(19) United States
(12) Patent Application Publication
(10) Pub. No.: US 2012/0227119 A1
(43) Pub. Date: Sep. 6, 2012

(54) Methods of Modulating the Sex of Avians

(75) Inventors: Timothy James Doran, Ocean Grove (AU); Robert John Moore, Ascot Vale (AU); John William Lowenthal, Belmont (AU); Craig Smith, Parkville (AU); Andrew Henrik Sinclair, South Melbourne (AU)

(73) Assignees: Australian Poultry CRC Pty Ltd, Armidale, New South Wales (AU); Commonwealth Scientific and Industrial Research Organisation, Campbell, ACT (AU)

(21) Appl. No.: 13/139,163

(22) PCT Filed: Dec. 16, 2009
(86) PCT No.: PCT/AU2009/001627

§ 371 Date: Dec. 21, 2011

Related U.S. Application Data
(60) Provisional application No. 61/138,235, filed on Dec. 17, 2008.

(51) Int. Cl. A01K 67/027; A61K 31/713

(52) U.S. Cl. 800/8; 514/44 A

(57) ABSTRACT

The present invention relates to nucleic acids and methods for modulating the sex of avians. In particular, the invention relates to the in ovo delivery of a dsRNA molecule, especially siRNAs, to increase the production of female birds.

### FIELD OF THE INVENTION

[0001] The present invention relates to nucleic acids and methods for modulating the sex of avians. In particular, the invention relates to the in ovo delivery of a dsRNA molecule, especially siRNAs, to increase the production of female birds.

### BACKGROUND OF THE INVENTION

[0002] Man has modified the phenotypic characteristics of domestic animals through selection of seed stock over many generations ever since animals were domesticated. This has led to improvements in quantitative production parameters such as body size and muscle mass. More recent innovations of modifying production traits of poultry and/or improving resistance to pathogens has focussed on transgenic approaches, however, many consumers have concerns about genetically modified organisms.

[0003] Chicken producers have been searching for an efficient, economical method of determining the sex of day old chicks. Vent sexing and feather sexing have been used by the various producers, but these methods have been found to have substantial economic disadvantages because of the substantial time required and labour costs in separating the male from the female chicks. The use of probes (U.S. Pat. No. 5,508,165) is also an expensive procedure and not practical economically. Light sensing of anal areas of chicks (U.S. Pat. No. 4,417,663) is another way of determining sex of chicks, but it is also expensive and time consuming as each chick must be handled and manipulated. The use of experts who could feather sex the chicks has been used, but such experts are costly and feathering is time consuming.

[0004] There is a need for nucleic acids and methods for modifying avian sex that do not result in transformation of the bird's genome, but are amenable to high throughout processing.

### SUMMARY OF THE INVENTION

[0005] The present inventors have identified nucleic acid molecules, in particular dsRNA molecules, which can be used to modify the sex of avians in ovo.

[0006] Accordingly, in one aspect the present invention provides an isolated and/or exogenous nucleic acid molecule comprising a double-stranded region which reduces the level of at least one RNA molecule and/or protein when administered to an avian egg, wherein if the embryo of the egg is male the sex is altered to female following administration of the isolated and/or exogenous nucleic acid molecule, and wherein the isolated and/or exogenous nucleic acid molecule does not comprise a sequence selected from:

### CCAGUUGUCAAGAAGAGCA (SEQ ID NO:254)

### GGAUGCUCAUUCAGGACAU (SEQ ID NO:369)

### CCCUGUAUCCUUACUAUAA (SEQ ID NO:474)

### GCCACUGAGUCUUCCUCAA (SEQ ID NO:530)

### CCAGCAACAUACAUGUCAA (SEQ ID NO:605)

### CCUGCGUCACACAGAUACU (SEQ ID NO:747)

### GGAGUAGUUGUACAGGUUG (SEQ ID NO:3432)

### GACUGGCUUGACAUGUAUG (SEQ ID NO:3433)

[0007] AUGGCGGUUCUCCAUCCCU (SEQ ID NO:3434) or a variant of any one thereof.

[0008] In another aspect, the present invention provides an isolated and/or exogenous nucleic acid molecule comprising one or more of the sequence of nucleotides provided as SEQ ID NO's 11 to 3431 or a variant of any one or more thereof, wherein the isolated and/or exogenous nucleic acid molecule does not comprise a sequence selected from:

### CCAGUUGUCAAGAAGAGCA (SEQ ID NO:254)

### GGAUGCUCAUUCAGGACAU (SEQ ID NO:369)

### CCCUGUAUCCUUACUAUAA (SEQ ID NO:474)

### GCCACUGAGUCUUCCUCAA (SEQ ID NO:530)

### CCAGCAACAUACAUGUCAA (SEQ ID NO:605)

### CCUGCGUCACACAGAUACU (SEQ ID NO:747)

### GGAGUAGUUGUACAGGUUG (SEQ ID NO:3432)

### GACUGGCUUGACAUGUAUG (SEQ ID NO:3433)

[0009] AUGGCGGUUCUCCAUCCCU (SEQ ID NO:3434) or a variant of any one thereof.

[0010] In a preferred embodiment, the nucleic acid molecule is dsRNA. More preferably, the dsRNA is a siRNA or a shRNA.

[0011] In a preferred embodiment, the nucleic acid molecule reduces the level of a protein encoded by a DMRT1 gene, ASW gene or r-spondin gene, in an avian egg.

[0012] In a preferred embodiment of the two above aspects, the nucleic acid does not comprise the full length open reading frame of the RNA molecule or the cDNA encoding therefor. In a related embodiment, preferably the nucleic acid does not comprise a sequence of nucleotides provided as SEQ ID NO's 2, 4 or 6, or a sequence of nucleotides provided as SEQ ID NO's 2, 4 or 6 where each T (thymine) is replaced with a U (uracil).

[0013] As the skilled addressee will appreciate, because the nucleic acid is double stranded it will also comprise the corresponding reverse complement of the relevant nucleotide sequence provided herewith.

[0014] Also provided is a vector encoding a nucleic acid molecule, or a single strand thereof, according to the invention. Such vectors can be used in a host cell or cell-free expression system to produce nucleic acid molecules useful for the method of the invention.

[0015] In another aspect, the present invention provides a host cell comprising an exogenous nucleic acid molecule, or a single strand thereof, of the invention and/or a vector of the invention.

[0016] In another aspect, the present invention provides a composition comprising a nucleic acid molecule, or a single strand thereof, of the invention, a vector of the invention, and/or a host cell of the invention.

[0017] In a further aspect, the present invention provides a method of modifying the sex of an avian, the method comprising administering to an avian egg at least one nucleic acid molecule of the invention.

[0018] Preferably, the nucleic acid is administered to a non-cellular site of the egg. More preferably, the non-cellular site is the air sac, yolk sac, amnionic cavity or chorion allantoic fluid.

[0019] In a further preferred embodiment, the egg is not electroporated.

[0020] Preferably, the nucleic acid is not delivered by administering a vector encoding the nucleic acid molecule.

[0021] Preferably, the nucleic acid molecule administered is dsRNA.

[0022] Preferably, the nucleic acid molecule is administered by injection.

[0023] Conveniently, the nucleic acid may be administered in a composition of the invention.

[0024] In a preferred embodiment, the method modifies the sex of the embryo of the egg from male to female.

[0025] The avian can be any species of the Class Ayes. Examples include, but are not limited to, chickens, ducks, turkeys, geese, bantams and quails. In a particularly preferred embodiment, the avian is a chicken.

[0026] In a further aspect, the present invention provides an avian produced using a method of the invention.

[0027] In another aspect, the present invention provides a chicken produced using a method of the invention.

[0028] In a further aspect, the present invention provides an avian egg comprising a nucleic acid molecule, or a single strand thereof, of the invention, a vector of the invention, and/or a host cell of the invention.

[0029] In another aspect, the present invention provides a kit comprising a nucleic acid molecule, or a single strand thereof, of the invention, a vector of the invention, a host cell of the invention, and/or a composition of the invention.

[0030] As will be apparent, preferred features and characteristics of one aspect of the invention are applicable to many other aspects of the invention.

[0031] Throughout this specification the word “comprise”, or variations such as “comprises” or “comprising”, will be understood to imply the inclusion of a stated element, integer or step, or group of elements, integers or steps, but not the exclusion of any other element, integer or step, or group of elements, integers or steps.

[0032] The invention is hereinafter described by way of the following non-limiting Examples and with reference to the accompanying figures.

### BRIEF DESCRIPTION OF THE ACCOMPANYING DRAWINGS

[0033] FIG. 1—Selected shRNAs for knockdown of EGFP-Dmrt1 gene fusion expression. Mean fluorescence intensity for each transfection condition expressed relative to pEGFP-Dmrt1. Error bars indicate standard error calculated on each individual experiment completed in triplicate.

[0034] FIG. 2—qPCR analysis of DMRT1 gene expression following silencing.

### KEY TO THE SEQUENCE LISTING

[0035] SEQ ID NO:1—Partial chicken DMRT1 protein sequence (Genbank AF123456).
SEQ ID NO:2—Partial nucleotide sequence encoding chicken DMRT1 (Genbank AF123456).

### SEQ ID NO:3—Chicken WPKCI (ASW) (Genbank AF148455).

[0036] SEQ ID NO:4—Nucleotide sequence encoding chicken WPKCI (ASW) (Genbank AF148455).
SEQ ID NO:5—Chicken r-spondin (Genbank XM_{—}417760).
SEQ ID NO:6—Nucleotide sequence encoding chicken r-spondin (Genbank XM_{—}417760).
SEQ ID NO:7—Nucleotide sequence of chicken U6-1 promoter.
SEQ ID NO:8—Nucleotide sequence of chicken U6-3 promoter.
SEQ ID NO:9—Nucleotide sequence of chicken U6-4 promoter.
SEQ ID NO:10—Nucleotide sequence of chicken 7SK promoter.
SEQ ID NO's 11 to 3430—RNA sequences provided in Tables 1 to 3 for silencing the chicken DMRT1, ASW or r-spondin genes.
SEQ ID NO's 3431 to 3434—RNA sequences suitable for silencing the chicken DMRT1 gene.
SEQ ID NO's 3435 to 3485—Target regions of chicken DMRT1.
SEQ ID NO's 3486 to 3499—Oligonucleotide primers and probes.

### DETAILED DESCRIPTION OF THE INVENTION

### General Techniques and Definitions

[0037] Unless specifically defined otherwise, all technical and scientific terms used herein shall be taken to have the same meaning as commonly understood by one of ordinary skill in the art (e.g., in cell culture, molecular genetics, avian biology, RNA interference, and biochemistry).

[0038] Unless otherwise indicated, the recombinant protein, cell culture, and immunological techniques utilized in the present invention are standard procedures, well known to those skilled in the art. Such techniques are described and explained throughout the literature in sources such as, J. Perbal, A Practical Guide to Molecular Cloning, John Wiley and Sons (1984), J. Sambrook et al., Molecular Cloning: A Laboratory Manual, Cold Spring Harbour Laboratory Press (1989), T. A. Brown (editor), Essential Molecular Biology: A Practical Approach, Volumes 1 and 2, IRL Press (1991), D. M. Glover and B. D. Hames (editors), DNA Cloning: A Practical Approach, Volumes 1-4, IRL Press (1995 and 1996), and F. M. Ausubel et al. (editors), Current Protocols in Molecular Biology, Greene Pub. Associates and Wiley-Interscience (1988, including all updates until present), Ed Harlow and David Lane (editors).

[0039] The term “avian” as used herein refers to any species, subspecies or race of organism of the taxonomic Class Ayes, such as, but not limited to, such organisms as chicken, turkey, duck, goose, quail, pheasants, parrots, finches, hawks, crows and ratites including ostrich, emu and cassowary. The term includes the various known strains of Gallus gallus (chickens), for example, White Leghorn, Brown Leghorn, Barred-Rock, Sussex, New Hampshire, Rhode Island, Australorp, Cornish, Minorca, Amrox, California Gray, Italian Partidge-coloured, as well as strains of turkeys, pheasants, quails, duck, ostriches and other poultry commonly bred in commercial quantities.

[0040] As used herein, the term “egg” refers to a fertilized ovum that has been laid by a bird. Typically, avian eggs consist of a hard, oval outer eggshell, the “egg white” or albumen, the egg yolk, and various thin membranes. Furthermore, “in ovo” refers to in an egg.

[0041] As used herein, the term “non-cellular site” refers a part of the egg other than the embryo.

[0042] The terms “reduces”, “reduction” or variations thereof as used herein refers to a measurable decrease in the amount of a target RNA and/or target protein in the egg when compared to an egg from the same species of avian, more preferably strain or breed of avian, and even more preferably the same bird, that has not been administered with a nucleic acid as defined herein. The term also refers to a measurable reduction in the activity of a target protein. Preferably a reduction in the level of a target RNA and/or target protein is at least about 10%. More preferably, the reduction is at least about 20%, 30%, 40%, 50%, 60%, 80%, 90% and even more preferably, about 100%.

[0043] As used herein, the phrase “the nucleic acid molecule results in a reduction” or variations thereof refers to the presence of the nucleic acid molecule in the egg inducing degradation of homologous RNAs in the egg by the process known in the art as “RNA interference” or “gene silencing”. Furthermore, the nucleic acid molecule directly results in the reduction, and is not transcribed in ovo to produce the desired effect.

[0044] The “at least one RNA molecule” can be any type of RNA present in, and/or produced by, an avian egg. Examples include, but are not limited to, mRNA, snRNA, microRNA and tRNA.

[0045] A “variant” of a nucleic acid molecule of the invention includes molecules of varying sizes of, and/or with one or more different nucleotides, but which are still capable of being used to silence the target gene. For example, variants may comprise additional nucleotides (such as 1, 2, 3, 4, or more), or less nucleotides. Furthermore, a few nucleotides may be substituted without influencing the ability of the nucleic acid to silence the target gene. In an embodiment, the variant includes additional 5′ and/or 3′ nucleotides which are homologous to the corresponding target RNA molecule and/or which enhance the stability of the nucleic acid molecule. In another embodiment, the nucleic acid molecules have no more than 4, more preferably no more than 3, more preferably no more than 2, and even more preferably no more than 1, nucleotide differences when compared to the sequences provided herein. In a further embodiment, the nucleic acid molecules have no more than 2, and more preferably no more than 1, internal additional and/or deletional nucleotides when compared to the sequences provided herein. In an embodiment, a nucleic acid of the invention has one, preferably two, additional non-target nucleotides at the 5′ and/or 3′ end, for example an additional UU at the 3′ end. Such additions can increase the half-life of the molecule in ovo.

[0046] By an “isolated nucleic acid molecule”, we mean a nucleic acid molecule which is at least partially separated from the nucleic acid molecule with which it is associated or linked in its native state. Preferably, the isolated nucleic acid molecule is at least 60% free, preferably at least 75% free, and most preferably at least 90% free from other components with which they are naturally associated. Furthermore, the term “polynucleotide” is used interchangeably herein with the term “nucleic acid”.

[0047] The term “exogenous” in the context of a nucleic acid molecule refers to the nucleic acid molecule when present in a cell, or in a cell-free expression system, in an altered amount. Preferably, the cell is a cell that does not naturally comprise the nucleic acid molecule. However, the cell may be a cell which comprises an exogenous nucleic acid molecule resulting in an increased amount of the nucleic acid molecule. An exogenous nucleic acid molecule of the invention includes nucleic acid molecules which have not been separated from other components of the recombinant cell, or cell-free expression system, in which it is present, and nucleic acid molecules produced in such cells or cell-free systems which are subsequently purified away from at least some other components.

### Sex Determination

[0048] The present invention relates to the modulation of the sex of avians in ovo. Examples of genes which can be targeted to modulate avian sex include, but are not necessarily limited to, the DMRT1 gene, the ASW (WPKCI) gene, the R-spondin gene, the Fox9 gene and the β-catenin gene.

[0049] In a preferred embodiment, the nucleic acid molecule reduces the level of a protein encoded by a DMRT1 gene. DMRT1 was the first molecule implicated in sex determination that shows sequence conservation between phyla. The avian homologue of DMRT1 is found on the Z (sex) chromosome of chickens and is differentially expressed in the genital ridges of male and female chicken embryos (Raymond et al., 1999; Smith et al., 1999). DMRT1 is one of the few genes thus far implicated in mammalian sex determination that appears to have a strictly gonadal pattern of expression (Raymond et al., 1999).

[0050] Examples of nucleic acid molecules that can be used to reduce the level of chicken DMRT1 protein, and mRNA encoding therefor, include, but are not limited to, nucleic acids comprising one or more of the sequence of nucleotides provided in Table 1 (SEQ ID NO's 11 to 1644), or a variant of any one or more thereof, with the exception that the nucleic acid molecule does not comprise a sequence selected from:

### CCAGUUGUCAAGAAGAGCA (SEQ ID NO:254)

### GGAUGCUCAUUCAGGACAU (SEQ ID NO:369)

### CCCUGUAUCCUUACUAUAA (SEQ ID NO:474)

### GCCACUGAGUCUUCCUCAA (SEQ ID NO:530)

### CCAGCAACAUACAUGUCAA (SEQ ID NO:605)

### CCUGCGUCACACAGAUACU (SEQ ID NO:747)

[0051] GGAGUAGUUGUACAGGUUG (SEQ ID NO:3432) (reverse complement of SEQ ID NO:493)
GACUGGCUUGACAUGUAUG (SEQ ID NO:3433) (reverse complement of SEQ ID NO:612)
AUGGCGGUUCUCCAUCCCU (SEQ ID NO:3434) (reverse complement of SEQ ID NO:1520), or a variant of any one thereof.

[0052] In a particularly preferred embodiment, the nucleic acid molecule that can be used to reduce the level of chicken DMRT1 protein comprises a sequence selected from; GAGCCAGUUGUCAAGAAGA (SEQ ID NO:251), GACUGCCAGUGCAAGAAGU (SEQ ID NO:116), CUGUAUCCUUACUAUAACA (SEQ ID NO:476), and CUCCCAGCAACAUACAUGU (SEQ ID NO:602), or a variant of any one thereof. More preferably, the nucleic acid molecule that can be used to reduce the level of chicken DMRT1 protein comprises the sequence, GAGCCAGUUGUCAAGAAGA (SEQ ID NO:251), or a variant thereof such as GAGCCAGUUGUCAAGAAGAUU (SEQ ID NO:3431).

[0053] A further example of a gene that can be targeted to modify sex is the WPKCI gene. The avian gene WPKCI has been shown to be conserved widely on the avian W chromosome and expressed actively in the female chicken embryo before the onset of gonadal differentiation. It is suggested that WPKCI may play a role in the differentiation of the female gonad by interfering with the function of PKCI or by exhibiting its unique function in the nucleus (Hori et al., 2000). This gene has also been identified as ASW (avian sex-specific W-linked) (O'Neill et al., 2000).

[0054] Examples of nucleic acid molecules that can be used to reduce the level of chicken ASW (WPKCI) protein, and mRNA encoding therefor, include, but are not limited to, nucleic acids comprising one or more of the sequence of nucleotides provided in Table 2 (SEQ ID NO's 1645 to 2209), or a variant of any one or more thereof.

[0055] In yet another example of a gene that can be targeted to modify sex is the r-spondin gene. Examples of nucleic acid molecules that can be used to reduce the level of chicken r-spondin protein, and mRNA encoding therefor, include, but are not limited to, nucleic acids comprising one or more of the sequence of nucleotides provided in Table 3 (SEQ ID NO's 2210 to 3430), or a variant of any one or more thereof.

### Gene Silencing

[0056] The terms “RNA interference”, “RNAi” or “gene silencing” refers generally to a process in which a double-stranded RNA (dsRNA) molecule reduces the expression of a nucleic acid sequence with which the double-stranded RNA molecule shares substantial or total homology. However, it has more recently been shown that gene silencing can be achieved using non-RNA double stranded molecules (see, for example, US 20070004667).

[0057] RNA interference (RNAi) is particularly useful for specifically inhibiting the production of a particular RNA and/or protein. Although not wishing to be limited by theory, Waterhouse et al. (1998) have provided a model for the mechanism by which dsRNA (duplex RNA) can be used to reduce protein production. This technology relies on the presence of dsRNA molecules that contain a sequence that is essentially identical to the mRNA of the gene of interest or part thereof, in this case an mRNA encoding a polypeptide of interest. Conveniently, the dsRNA can be produced from a single promoter in a recombinant vector or host cell, where the sense and anti-sense sequences are flanked by an unrelated sequence which enables the sense and anti-sense sequences to hybridize to form the dsRNA molecule with the unrelated sequence forming a loop structure. The design and production of suitable dsRNA molecules for the present invention is well within the capacity of a person skilled in the art, particularly considering Waterhouse et al. (1998), Smith et al. (2000), WO 99/32619, WO 99/53050, WO 99/49029 and WO 01/34815.

[0058] The present invention includes nucleic acid molecules comprising and/or encoding double-stranded regions for gene silencing. The nucleic acid molecules are typically RNA but may comprise DNA, chemically-modified nucleotides and non-nucleotides.

TABLE 1
DsRNA molecules targeting mRNA encoding chicken
DMRT1.

| SEQ ID NO | Sequence 5′-3′ |
|---|---|
| 11 | CCGGCGGCGGGCAAGAAGC |
| 12 | CGGCGGCGGGCAAGAAGCU |
| 13 | GGCGGCGGGCAAGAAGCUG |
| 14 | GCGGCGGGCAAGAAGCUGC |
| 15 | CGGCGGGCAAGAAGCUGCC |
| 16 | GGCGGGCAAGAAGCUGCCG |
| 17 | GCGGGCAAGAAGCUGCCGC |
| 18 | CGGGCAAGAAGCUGCCGCG |
| 19 | GGGCAAGAAGCUGCCGCGU |
| 20 | GGCAAGAAGCUGCCGCGUC |
| 21 | GCAAGAAGCUGCCGCGUCU |
| 22 | CAAGAAGCUGCCGCGUCUG |
| 23 | AAGAAGCUGCCGCGUCUGC |
| 24 | AGAAGCUGCCGCGUCUGCC |
| 25 | GAAGCUGCCGCGUCUGCCC |
| 26 | AAGCUGCCGCGUCUGCCCA |
| 27 | AGCUGCCGCGUCUGCCCAA |
| 28 | GCUGCCGCGUCUGCCCAAG |
| 29 | CUGCCGCGUCUGCCCAAGU |
| 30 | UGCCGCGUCUGCCCAAGUG |
| 31 | GCCGCGUCUGCCCAAGUGU |
| 32 | CCGCGUCUGCCCAAGUGUG |
| 33 | CGCGUCUGCCCAAGUGUGC |
| 34 | GCGUCUGCCCAAGUGUGCC |
| 35 | CGUCUGCCCAAGUGUGCCC |
| 36 | GUCUGCCCAAGUGUGCCCG |
| 37 | UCUGCCCAAGUGUGCCCGC |
| 38 | CUGCCCAAGUGUGCCCGCU |
| 39 | UGCCCAAGUGUGCCCGCUG |
| 40 | GCCCAAGUGUGCCCGCUGC |
| 41 | CCCAAGUGUGCCCGCUGCC |
| 42 | CCAAGUGUGCCCGCUGCCG |
| 43 | CAAGUGUGCCCGCUGCCGC |
| 44 | AAGUGUGCCCGCUGCCGCA |
| 45 | AGUGUGCCCGCUGCCGCAA |
| 46 | GUGUGCCCGCUGCCGCAAC |
| 47 | UGUGCCCGCUGCCGCAACC |
| 48 | GUGCCCGCUGCCGCAACCA |
| 49 | UGCCCGCUGCCGCAACCAC |
| 50 | GCCCGCUGCCGCAACCACG |
| 51 | CCCGCUGCCGCAACCACGG |
| 52 | CCGCUGCCGCAACCACGGC |
| 53 | CGCUGCCGCAACCACGGCU |
| 54 | GCUGCCGCAACCACGGCUA |
| 55 | CUGCCGCAACCACGGCUAC |
| 56 | UGCCGCAACCACGGCUACU |
| 57 | GCCGCAACCACGGCUACUC |
| 58 | CCGCAACCACGGCUACUCC |
| 59 | CGCAACCACGGCUACUCCU |
| 60 | GCAACCACGGCUACUCCUC |
| 61 | CAACCACGGCUACUCCUCG |
| 62 | AACCACGGCUACUCCUCGC |
| 63 | ACCACGGCUACUCCUCGCC |
| 64 | CCACGGCUACUCCUCGCCG |
| 65 | CACGGCUACUCCUCGCCGC |
| 66 | ACGGCUACUCCUCGCCGCU |
| 67 | CGGCUACUCCUCGCCGCUG |
| 68 | GGCUACUCCUCGCCGCUGA |
| 69 | GCUACUCCUCGCCGCUGAA |
| 70 | CUACUCCUCGCCGCUGAAG |
| 71 | UACUCCUCGCCGCUGAAGG |
| 72 | ACUCCUCGCCGCUGAAGGG |
| 73 | CUCCUCGCCGCUGAAGGGG |
| 74 | UCCUCGCCGCUGAAGGGGC |
| 75 | CCUCGCCGCUGAAGGGGCA |
| 76 | CUCGCCGCUGAAGGGGCAC |
| 77 | UCGCCGCUGAAGGGGCACA |
| 78 | CGCCGCUGAAGGGGCACAA |
| 79 | GCCGCUGAAGGGGCACAAG |
| 80 | CCGCUGAAGGGGCACAAGC |
| 81 | CGCUGAAGGGGCACAAGCG |
| 82 | GCUGAAGGGGCACAAGCGG |
| 83 | CUGAAGGGGCACAAGCGGU |
| 84 | UGAAGGGGCACAAGCGGUU |
| 85 | GAAGGGGCACAAGCGGUUC |
| 86 | AAGGGGCACAAGCGGUUCU |
| 87 | AGGGGCACAAGCGGUUCUG |
| 88 | GGGGCACAAGCGGUUCUGC |
| 89 | GGGCACAAGCGGUUCUGCA |
| 90 | GGCACAAGCGGUUCUGCAU |
| 91 | GCACAAGCGGUUCUGCAUG |
| 92 | CACAAGCGGUUCUGCAUGU |
| 93 | ACAAGCGGUUCUGCAUGUG |
| 94 | CAAGCGGUUCUGCAUGUGG |
| 95 | AAGCGGUUCUGCAUGUGGC |
| 96 | AGCGGUUCUGCAUGUGGCG |
| 97 | GCGGUUCUGCAUGUGGCGG |
| 98 | CGGUUCUGCAUGUGGCGGG |
| 99 | GGUUCUGCAUGUGGCGGGA |
| 100 | GUUCUGCAUGUGGCGGGAC |
| 101 | UUCUGCAUGUGGCGGGACU |
| 102 | UCUGCAUGUGGCGGGACUG |
| 103 | CUGCAUGUGGCGGGACUGC |
| 104 | UGCAUGUGGCGGGACUGCC |
| 105 | GCAUGUGGCGGGACUGCCA |
| 106 | CAUGUGGCGGGACUGCCAG |
| 107 | AUGUGGCGGGACUGCCAGU |
| 108 | UGUGGCGGGACUGCCAGUG |
| 109 | GUGGCGGGACUGCCAGUGC |
| 110 | UGGCGGGACUGCCAGUGCA |
| 111 | GGCGGGACUGCCAGUGCAA |
| 112 | GCGGGACUGCCAGUGCAAG |
| 113 | CGGGACUGCCAGUGCAAGA |
| 114 | GGGACUGCCAGUGCAAGAA |
| 115 | GGACUGCCAGUGCAAGAAG |
| 116 | GACUGCCAGUGCAAGAAGU |
| 117 | ACUGCCAGUGCAAGAAGUG |
| 118 | CUGCCAGUGCAAGAAGUGC |
| 119 | UGCCAGUGCAAGAAGUGCA |
| 120 | GCCAGUGCAAGAAGUGCAG |
| 121 | CCAGUGCAAGAAGUGCAGC |
| 122 | CAGUGCAAGAAGUGCAGCC |
| 123 | AGUGCAAGAAGUGCAGCCU |
| 124 | GUGCAAGAAGUGCAGCCUG |
| 125 | UGCAAGAAGUGCAGCCUGA |
| 126 | GCAAGAAGUGCAGCCUGAU |
| 127 | CAAGAAGUGCAGCCUGAUC |
| 128 | AAGAAGUGCAGCCUGAUCG |
| 129 | AGAAGUGCAGCCUGAUCGC |
| 130 | GAAGUGCAGCCUGAUCGCC |
| 131 | AAGUGCAGCCUGAUCGCCG |
| 132 | AGUGCAGCCUGAUCGCCGA |
| 133 | GUGCAGCCUGAUCGCCGAG |
| 134 | UGCAGCCUGAUCGCCGAGC |
| 135 | GCAGCCUGAUCGCCGAGCG |
| 136 | CAGCCUGAUCGCCGAGCGG |
| 137 | AGCCUGAUCGCCGAGCGGC |
| 138 | GCCUGAUCGCCGAGCGGCA |
| 139 | CCUGAUCGCCGAGCGGCAG |
| 140 | CUGAUCGCCGAGCGGCAGC |
| 141 | UGAUCGCCGAGCGGCAGCG |
| 142 | GAUCGCCGAGCGGCAGCGG |
| 143 | AUCGCCGAGCGGCAGCGGG |
| 144 | UCGCCGAGCGGCAGCGGGU |
| 145 | CGCCGAGCGGCAGCGGGUG |
| 146 | GCCGAGCGGCAGCGGGUGA |
| 147 | CCGAGCGGCAGCGGGUGAU |
| 148 | CGAGCGGCAGCGGGUGAUG |
| 149 | GAGCGGCAGCGGGUGAUGG |
| 150 | AGCGGCAGCGGGUGAUGGC |
| 151 | GCGGCAGCGGGUGAUGGCC |
| 152 | CGGCAGCGGGUGAUGGCCG |
| 153 | GGCAGCGGGUGAUGGCCGU |
| 154 | GCAGCGGGUGAUGGCCGUG |
| 155 | CAGCGGGUGAUGGCCGUGC |
| 156 | AGCGGGUGAUGGCCGUGCA |
| 157 | GCGGGUGAUGGCCGUGCAG |
| 158 | CGGGUGAUGGCCGUGCAGG |
| 159 | GGGUGAUGGCCGUGCAGGU |
| 160 | GGUGAUGGCCGUGCAGGUU |
| 161 | GUGAUGGCCGUGCAGGUUG |
| 162 | UGAUGGCCGUGCAGGUUGC |
| 163 | GAUGGCCGUGCAGGUUGCA |
| 164 | AUGGCCGUGCAGGUUGCAC |
| 165 | UGGCCGUGCAGGUUGCACU |
| 166 | GGCCGUGCAGGUUGCACUG |
| 167 | GCCGUGCAGGUUGCACUGA |
| 168 | CCGUGCAGGUUGCACUGAG |
| 169 | CGUGCAGGUUGCACUGAGG |
| 170 | GUGCAGGUUGCACUGAGGA |
| 171 | UGCAGGUUGCACUGAGGAG |
| 172 | GCAGGUUGCACUGAGGAGG |
| 173 | CAGGUUGCACUGAGGAGGC |
| 174 | AGGUUGCACUGAGGAGGCA |
| 175 | GGUUGCACUGAGGAGGCAG |
| 176 | GUUGCACUGAGGAGGCAGC |
| 177 | UUGCACUGAGGAGGCAGCA |
| 178 | UGCACUGAGGAGGCAGCAA |
| 179 | GCACUGAGGAGGCAGCAAG |
| 180 | CACUGAGGAGGCAGCAAGC |
| 181 | ACUGAGGAGGCAGCAAGCC |
| 182 | CUGAGGAGGCAGCAAGCCC |
| 183 | UGAGGAGGCAGCAAGCCCA |
| 184 | GAGGAGGCAGCAAGCCCAG |
| 185 | AGGAGGCAGCAAGCCCAGG |
| 186 | GGAGGCAGCAAGCCCAGGA |
| 187 | GAGGCAGCAAGCCCAGGAA |
| 188 | AGGCAGCAAGCCCAGGAAG |
| 189 | GGCAGCAAGCCCAGGAAGA |
| 190 | GCAGCAAGCCCAGGAAGAG |
| 191 | CAGCAAGCCCAGGAAGAGG |
| 192 | AGCAAGCCCAGGAAGAGGA |
| 193 | GCAAGCCCAGGAAGAGGAG |
| 194 | CAAGCCCAGGAAGAGGAGC |
| 195 | AAGCCCAGGAAGAGGAGCU |
| 196 | AGCCCAGGAAGAGGAGCUG |
| 197 | GCCCAGGAAGAGGAGCUGG |
| 198 | CCCAGGAAGAGGAGCUGGG |
| 199 | CCAGGAAGAGGAGCUGGGG |
| 200 | CAGGAAGAGGAGCUGGGGA |
| 201 | AGGAAGAGGAGCUGGGGAU |
| 202 | GGAAGAGGAGCUGGGGAUC |
| 203 | GAAGAGGAGCUGGGGAUCA |
| 204 | AAGAGGAGCUGGGGAUCAG |
| 205 | AGAGGAGCUGGGGAUCAGC |
| 206 | GAGGAGCUGGGGAUCAGCC |
| 207 | AGGAGCUGGGGAUCAGCCA |
| 208 | GGAGCUGGGGAUCAGCCAC |
| 209 | GAGCUGGGGAUCAGCCACC |
| 210 | AGCUGGGGAUCAGCCACCC |
| 211 | GCUGGGGAUCAGCCACCCU |
| 212 | CUGGGGAUCAGCCACCCUG |
| 213 | UGGGGAUCAGCCACCCUGU |
| 214 | GGGGAUCAGCCACCCUGUA |
| 215 | GGGAUCAGCCACCCUGUAC |
| 216 | GGAUCAGCCACCCUGUACC |
| 217 | GAUCAGCCACCCUGUACCC |
| 218 | AUCAGCCACCCUGUACCCC |
| 219 | UCAGCCACCCUGUACCCCU |
| 220 | CAGCCACCCUGUACCCCUG |
| 221 | AGCCACCCUGUACCCCUGC |
| 222 | GCCACCCUGUACCCCUGCC |
| 223 | CCACCCUGUACCCCUGCCC |
| 224 | CACCCUGUACCCCUGCCCA |
| 225 | ACCCUGUACCCCUGCCCAG |
| 226 | CCCUGUACCCCUGCCCAGU |
| 227 | CCUGUACCCCUGCCCAGUG |
| 228 | CUGUACCCCUGCCCAGUGC |
| 229 | UGUACCCCUGCCCAGUGCC |
| 230 | GUACCCCUGCCCAGUGCCC |
| 231 | UACCCCUGCCCAGUGCCCC |
| 232 | ACCCCUGCCCAGUGCCCCU |
| 233 | CCCCUGCCCAGUGCCCCUG |
| 234 | CCCUGCCCAGUGCCCCUGA |
| 235 | CCUGCCCAGUGCCCCUGAG |
| 236 | CUGCCCAGUGCCCCUGAGC |
| 237 | UGCCCAGUGCCCCUGAGCC |
| 238 | GCCCAGUGCCCCUGAGCCA |
| 239 | CCCAGUGCCCCUGAGCCAG |
| 240 | CCAGUGCCCCUGAGCCAGU |
| 241 | CAGUGCCCCUGAGCCAGUU |
| 242 | AGUGCCCCUGAGCCAGUUG |
| 243 | GUGCCCCUGAGCCAGUUGU |
| 244 | UGCCCCUGAGCCAGUUGUC |
| 245 | GCCCCUGAGCCAGUUGUCA |
| 246 | CCCCUGAGCCAGUUGUCAA |
| 247 | CCCUGAGCCAGUUGUCAAG |
| 248 | CCUGAGCCAGUUGUCAAGA |
| 249 | CUGAGCCAGUUGUCAAGAA |
| 250 | UGAGCCAGUUGUCAAGAAG |
| 251 | GAGCCAGUUGUCAAGAAGA |
| 252 | AGCCAGUUGUCAAGAAGAG |
| 253 | GCCAGUUGUCAAGAAGAGC |
| 254 | CCAGUUGUCAAGAAGAGCA |
| 255 | CAGUUGUCAAGAAGAGCAG |
| 256 | AGUUGUCAAGAAGAGCAGC |
| 257 | GUUGUCAAGAAGAGCAGCA |
| 258 | UUGUCAAGAAGAGCAGCAG |
| 259 | UGUCAAGAAGAGCAGCAGC |
| 260 | GUCAAGAAGAGCAGCAGCA |
| 261 | UCAAGAAGAGCAGCAGCAG |
| 262 | CAAGAAGAGCAGCAGCAGC |
| 263 | AAGAAGAGCAGCAGCAGCA |
| 264 | AGAAGAGCAGCAGCAGCAG |
| 265 | GAAGAGCAGCAGCAGCAGC |
| 266 | AAGAGCAGCAGCAGCAGCU |
| 267 | AGAGCAGCAGCAGCAGCUC |
| 268 | GAGCAGCAGCAGCAGCUCC |
| 269 | AGCAGCAGCAGCAGCUCCU |
| 270 | GCAGCAGCAGCAGCUCCUG |
| 271 | CAGCAGCAGCAGCUCCUGU |
| 272 | AGCAGCAGCAGCUCCUGUC |
| 273 | GCAGCAGCAGCUCCUGUCU |
| 274 | CAGCAGCAGCUCCUGUCUC |
| 275 | AGCAGCAGCUCCUGUCUCC |
| 276 | GCAGCAGCUCCUGUCUCCU |
| 277 | CAGCAGCUCCUGUCUCCUG |
| 278 | AGCAGCUCCUGUCUCCUGC |
| 279 | GCAGCUCCUGUCUCCUGCA |
| 280 | CAGCUCCUGUCUCCUGCAG |
| 281 | AGCUCCUGUCUCCUGCAGG |
| 282 | GCUCCUGUCUCCUGCAGGA |
| 283 | CUCCUGUCUCCUGCAGGAC |
| 284 | UCCUGUCUCCUGCAGGACA |
| 285 | CCUGUCUCCUGCAGGACAG |
| 286 | CUGUCUCCUGCAGGACAGC |
| 287 | UGUCUCCUGCAGGACAGCA |
| 288 | GUCUCCUGCAGGACAGCAG |
| 289 | UCUCCUGCAGGACAGCAGC |
| 290 | CUCCUGCAGGACAGCAGCA |
| 291 | UCCUGCAGGACAGCAGCAG |
| 292 | CCUGCAGGACAGCAGCAGC |
| 293 | CUGCAGGACAGCAGCAGCC |
| 294 | UGCAGGACAGCAGCAGCCC |
| 295 | GCAGGACAGCAGCAGCCCU |
| 296 | CAGGACAGCAGCAGCCCUG |
| 297 | AGGACAGCAGCAGCCCUGC |
| 298 | GGACAGCAGCAGCCCUGCU |
| 299 | GACAGCAGCAGCCCUGCUC |
| 300 | ACAGCAGCAGCCCUGCUCA |
| 301 | CAGCAGCAGCCCUGCUCAC |
| 302 | AGCAGCAGCCCUGCUCACU |
| 303 | GCAGCAGCCCUGCUCACUC |
| 304 | CAGCAGCCCUGCUCACUCC |
| 305 | AGCAGCCCUGCUCACUCCA |
| 306 | GCAGCCCUGCUCACUCCAC |
| 307 | CAGCCCUGCUCACUCCACG |
| 308 | AGCCCUGCUCACUCCACGA |
| 309 | GCCCUGCUCACUCCACGAG |
| 310 | CCCUGCUCACUCCACGAGC |
| 311 | CCUGCUCACUCCACGAGCA |
| 312 | CUGCUCACUCCACGAGCAC |
| 313 | UGCUCACUCCACGAGCACG |
| 314 | GCUCACUCCACGAGCACGG |
| 315 | CUCACUCCACGAGCACGGU |
| 316 | UCACUCCACGAGCACGGUG |
| 317 | CACUCCACGAGCACGGUGG |
| 318 | ACUCCACGAGCACGGUGGC |
| 319 | CUCCACGAGCACGGUGGCA |
| 320 | UCCACGAGCACGGUGGCAG |
| 321 | CCACGAGCACGGUGGCAGC |
| 322 | CACGAGCACGGUGGCAGCA |
| 323 | ACGAGCACGGUGGCAGCAG |
| 324 | CGAGCACGGUGGCAGCAGC |
| 325 | GAGCACGGUGGCAGCAGCA |
| 326 | AGCACGGUGGCAGCAGCAG |
| 327 | GCACGGUGGCAGCAGCAGC |
| 328 | CACGGUGGCAGCAGCAGCA |
| 329 | ACGGUGGCAGCAGCAGCAG |
| 330 | CGGUGGCAGCAGCAGCAGC |
| 331 | GGUGGCAGCAGCAGCAGCG |
| 332 | GUGGCAGCAGCAGCAGCGA |
| 333 | UGGCAGCAGCAGCAGCGAG |
| 334 | GGCAGCAGCAGCAGCGAGC |
| 335 | GCAGCAGCAGCAGCGAGCG |
| 336 | CAGCAGCAGCAGCGAGCGC |
| 337 | AGCAGCAGCAGCGAGCGCA |
| 338 | GCAGCAGCAGCGAGCGCAC |
| 339 | CAGCAGCAGCGAGCGCACC |
| 340 | AGCAGCAGCGAGCGCACCA |
| 341 | GCAGCAGCGAGCGCACCAC |
| 342 | CAGCAGCGAGCGCACCACC |
| 343 | AGCAGCGAGCGCACCACCA |
| 344 | GCAGCGAGCGCACCACCAG |
| 345 | CAGCGAGCGCACCACCAGA |
| 346 | AGCGAGCGCACCACCAGAG |
| 347 | GCGAGCGCACCACCAGAGG |
| 348 | CGAGCGCACCACCAGAGGG |
| 349 | GAGCGCACCACCAGAGGGA |
| 350 | AGCGCACCACCAGAGGGAC |
| 351 | GCGCACCACCAGAGGGACG |
| 352 | CGCACCACCAGAGGGACGG |
| 353 | GCACCACCAGAGGGACGGA |
| 354 | CACCACCAGAGGGACGGAU |
| 355 | ACCACCAGAGGGACGGAUG |
| 356 | CCACCAGAGGGACGGAUGC |
| 357 | CACCAGAGGGACGGAUGCU |
| 358 | ACCAGAGGGACGGAUGCUC |
| 359 | CCAGAGGGACGGAUGCUCA |
| 360 | CAGAGGGACGGAUGCUCAU |
| 361 | AGAGGGACGGAUGCUCAUU |
| 362 | GAGGGACGGAUGCUCAUUC |
| 363 | AGGGACGGAUGCUCAUUCA |
| 364 | GGGACGGAUGCUCAUUCAG |
| 365 | GGACGGAUGCUCAUUCAGG |
| 366 | GACGGAUGCUCAUUCAGGA |
| 367 | ACGGAUGCUCAUUCAGGAC |
| 368 | CGGAUGCUCAUUCAGGACA |
| 369 | GGAUGCUCAUUCAGGACAU |
| 370 | GAUGCUCAUUCAGGACAUC |
| 371 | AUGCUCAUUCAGGACAUCC |
| 372 | UGCUCAUUCAGGACAUCCC |
| 373 | GCUCAUUCAGGACAUCCCU |
| 374 | CUCAUUCAGGACAUCCCUU |
| 375 | UCAUUCAGGACAUCCCUUC |
| 376 | CAUUCAGGACAUCCCUUCC |
| 377 | AUUCAGGACAUCCCUUCCA |
| 378 | UUCAGGACAUCCCUUCCAU |
| 379 | UCAGGACAUCCCUUCCAUC |
| 380 | CAGGACAUCCCUUCCAUCC |
| 381 | AGGACAUCCCUUCCAUCCC |
| 382 | GGACAUCCCUUCCAUCCCC |
| 383 | GACAUCCCUUCCAUCCCCA |
| 384 | ACAUCCCUUCCAUCCCCAG |
| 385 | CAUCCCUUCCAUCCCCAGC |
| 386 | AUCCCUUCCAUCCCCAGCA |
| 387 | UCCCUUCCAUCCCCAGCAG |
| 388 | CCCUUCCAUCCCCAGCAGA |
| 389 | CCUUCCAUCCCCAGCAGAG |
| 390 | CUUCCAUCCCCAGCAGAGG |
| 391 | UUCCAUCCCCAGCAGAGGG |
| 392 | UCCAUCCCCAGCAGAGGGC |
| 393 | CCAUCCCCAGCAGAGGGCA |
| 394 | CAUCCCCAGCAGAGGGCAC |
| 395 | AUCCCCAGCAGAGGGCACU |
| 396 | UCCCCAGCAGAGGGCACUU |
| 397 | CCCCAGCAGAGGGCACUUG |
| 398 | CCCAGCAGAGGGCACUUGG |
| 399 | CCAGCAGAGGGCACUUGGA |
| 400 | CAGCAGAGGGCACUUGGAG |
| 401 | AGCAGAGGGCACUUGGAGA |
| 402 | GCAGAGGGCACUUGGAGAG |
| 403 | CAGAGGGCACUUGGAGAGC |
| 404 | AGAGGGCACUUGGAGAGCA |
| 405 | GAGGGCACUUGGAGAGCAC |
| 406 | AGGGCACUUGGAGAGCACG |
| 407 | GGGCACUUGGAGAGCACGU |
| 408 | GGCACUUGGAGAGCACGUC |
| 409 | GCACUUGGAGAGCACGUCU |
| 410 | CACUUGGAGAGCACGUCUG |
| 411 | ACUUGGAGAGCACGUCUGA |
| 412 | CUUGGAGAGCACGUCUGAU |
| 413 | UUGGAGAGCACGUCUGAUU |
| 414 | UGGAGAGCACGUCUGAUUU |
| 415 | GGAGAGCACGUCUGAUUUG |
| 416 | GAGAGCACGUCUGAUUUGG |
| 417 | AGAGCACGUCUGAUUUGGU |
| 418 | GAGCACGUCUGAUUUGGUU |
| 419 | AGCACGUCUGAUUUGGUUG |
| 420 | GCACGUCUGAUUUGGUUGU |
| 421 | CACGUCUGAUUUGGUUGUG |
| 422 | ACGUCUGAUUUGGUUGUGG |
| 423 | CGUCUGAUUUGGUUGUGGA |
| 424 | GUCUGAUUUGGUUGUGGAC |
| 425 | UCUGAUUUGGUUGUGGACU |
| 426 | CUGAUUUGGUUGUGGACUC |
| 427 | UGAUUUGGUUGUGGACUCC |
| 428 | GAUUUGGUUGUGGACUCCA |
| 429 | AUUUGGUUGUGGACUCCAC |
| 430 | UUUGGUUGUGGACUCCACC |
| 431 | UUGGUUGUGGACUCCACCU |
| 432 | UGGUUGUGGACUCCACCUA |
| 433 | GGUUGUGGACUCCACCUAC |
| 434 | GUUGUGGACUCCACCUACU |
| 435 | UUGUGGACUCCACCUACUA |
| 436 | UGUGGACUCCACCUACUAC |
| 437 | GUGGACUCCACCUACUACA |
| 438 | UGGACUCCACCUACUACAG |
| 439 | GGACUCCACCUACUACAGC |
| 440 | GACUCCACCUACUACAGCA |
| 441 | ACUCCACCUACUACAGCAG |
| 442 | CUCCACCUACUACAGCAGU |
| 443 | UCCACCUACUACAGCAGUU |
| 444 | CCACCUACUACAGCAGUUU |
| 445 | CACCUACUACAGCAGUUUU |
| 446 | ACCUACUACAGCAGUUUUU |
| 447 | CCUACUACAGCAGUUUUUA |
| 448 | CUACUACAGCAGUUUUUAC |
| 449 | UACUACAGCAGUUUUUACC |
| 450 | ACUACAGCAGUUUUUACCA |
| 451 | CUACAGCAGUUUUUACCAG |
| 452 | UACAGCAGUUUUUACCAGC |
| 453 | ACAGCAGUUUUUACCAGCC |
| 454 | CAGCAGUUUUUACCAGCCA |
| 455 | AGCAGUUUUUACCAGCCAU |
| 456 | GCAGUUUUUACCAGCCAUC |
| 457 | CAGUUUUUACCAGCCAUCC |
| 458 | AGUUUUUACCAGCCAUCCC |
| 459 | GUUUUUACCAGCCAUCCCU |
| 460 | UUUUUACCAGCCAUCCCUG |
| 461 | UUUUACCAGCCAUCCCUGU |
| 462 | UUUACCAGCCAUCCCUGUA |
| 463 | UUACCAGCCAUCCCUGUAU |
| 464 | UACCAGCCAUCCCUGUAUC |
| 465 | ACCAGCCAUCCCUGUAUCC |
| 466 | CCAGCCAUCCCUGUAUCCU |
| 467 | CAGCCAUCCCUGUAUCCUU |
| 468 | AGCCAUCCCUGUAUCCUUA |
| 469 | GCCAUCCCUGUAUCCUUAC |
| 470 | CCAUCCCUGUAUCCUUACU |
| 471 | CAUCCCUGUAUCCUUACUA |
| 472 | AUCCCUGUAUCCUUACUAU |
| 473 | UCCCUGUAUCCUUACUAUA |
| 474 | CCCUGUAUCCUUACUAUAA |
| 475 | CCUGUAUCCUUACUAUAAC |
| 476 | CUGUAUCCUUACUAUAACA |
| 477 | UGUAUCCUUACUAUAACAA |
| 478 | GUAUCCUUACUAUAACAAC |
| 479 | UAUCCUUACUAUAACAACC |
| 480 | AUCCUUACUAUAACAACCU |
| 481 | UCCUUACUAUAACAACCUG |
| 482 | CCUUACUAUAACAACCUGU |
| 483 | CUUACUAUAACAACCUGUA |
| 484 | UUACUAUAACAACCUGUAC |
| 485 | UACUAUAACAACCUGUACA |
| 486 | ACUAUAACAACCUGUACAA |
| 487 | CUAUAACAACCUGUACAAC |
| 488 | UAUAACAACCUGUACAACU |
| 489 | AUAACAACCUGUACAACUA |
| 490 | UAACAACCUGUACAACUAC |
| 491 | AACAACCUGUACAACUACU |
| 492 | ACAACCUGUACAACUACUC |
| 493 | CAACCUGUACAACUACUCC |
| 494 | AACCUGUACAACUACUCCC |
| 495 | ACCUGUACAACUACUCCCA |
| 496 | CCUGUACAACUACUCCCAG |
| 497 | CUGUACAACUACUCCCAGU |
| 498 | UGUACAACUACUCCCAGUA |
| 499 | GUACAACUACUCCCAGUAC |
| 500 | UACAACUACUCCCAGUACC |
| 501 | ACAACUACUCCCAGUACCA |
| 502 | CAACUACUCCCAGUACCAA |
| 503 | AACUACUCCCAGUACCAAA |
| 504 | ACUACUCCCAGUACCAAAU |
| 505 | CUACUCCCAGUACCAAAUG |
| 506 | UACUCCCAGUACCAAAUGG |
| 507 | ACUCCCAGUACCAAAUGGC |
| 508 | CUCCCAGUACCAAAUGGCA |
| 509 | UCCCAGUACCAAAUGGCAG |
| 510 | CCCAGUACCAAAUGGCAGU |
| 511 | CCAGUACCAAAUGGCAGUG |
| 512 | CAGUACCAAAUGGCAGUGG |
| 513 | AGUACCAAAUGGCAGUGGC |
| 514 | GUACCAAAUGGCAGUGGCC |
| 515 | UACCAAAUGGCAGUGGCCA |
| 516 | ACCAAAUGGCAGUGGCCAC |
| 517 | CCAAAUGGCAGUGGCCACU |
| 518 | CAAAUGGCAGUGGCCACUG |
| 519 | AAAUGGCAGUGGCCACUGA |
| 520 | AAUGGCAGUGGCCACUGAG |
| 521 | AUGGCAGUGGCCACUGAGU |
| 522 | UGGCAGUGGCCACUGAGUC |
| 523 | GGCAGUGGCCACUGAGUCU |
| 524 | GCAGUGGCCACUGAGUCUU |
| 525 | CAGUGGCCACUGAGUCUUC |
| 526 | AGUGGCCACUGAGUCUUCC |
| 527 | GUGGCCACUGAGUCUUCCU |
| 528 | UGGCCACUGAGUCUUCCUC |
| 529 | GGCCACUGAGUCUUCCUCA |
| 530 | GCCACUGAGUCUUCCUCAA |
| 531 | CCACUGAGUCUUCCUCAAG |
| 532 | CACUGAGUCUUCCUCAAGU |
| 533 | ACUGAGUCUUCCUCAAGUG |
| 534 | CUGAGUCUUCCUCAAGUGA |
| 535 | UGAGUCUUCCUCAAGUGAG |
| 536 | GAGUCUUCCUCAAGUGAGA |
| 537 | AGUCUUCCUCAAGUGAGAC |
| 538 | GUCUUCCUCAAGUGAGACA |
| 539 | UCUUCCUCAAGUGAGACAG |
| 540 | CUUCCUCAAGUGAGACAGG |
| 541 | UUCCUCAAGUGAGACAGGG |
| 542 | UCCUCAAGUGAGACAGGGG |
| 543 | CCUCAAGUGAGACAGGGGG |
| 544 | CUCAAGUGAGACAGGGGGU |
| 545 | UCAAGUGAGACAGGGGGUA |
| 546 | CAAGUGAGACAGGGGGUAC |
| 547 | AAGUGAGACAGGGGGUACG |
| 548 | AGUGAGACAGGGGGUACGU |
| 549 | GUGAGACAGGGGGUACGUU |
| 550 | UGAGACAGGGGGUACGUUU |
| 551 | GAGACAGGGGGUACGUUUG |
| 552 | AGACAGGGGGUACGUUUGU |
| 553 | GACAGGGGGUACGUUUGUA |
| 554 | ACAGGGGGUACGUUUGUAG |
| 555 | CAGGGGGUACGUUUGUAGG |
| 556 | AGGGGGUACGUUUGUAGGG |
| 557 | GGGGGUACGUUUGUAGGGU |
| 558 | GGGGUACGUUUGUAGGGUC |
| 559 | GGGUACGUUUGUAGGGUCA |
| 560 | GGUACGUUUGUAGGGUCAG |
| 561 | GUACGUUUGUAGGGUCAGC |
| 562 | UACGUUUGUAGGGUCAGCC |
| 563 | ACGUUUGUAGGGUCAGCCA |
| 564 | CGUUUGUAGGGUCAGCCAU |
| 565 | GUUUGUAGGGUCAGCCAUG |
| 566 | UUUGUAGGGUCAGCCAUGA |
| 567 | UUGUAGGGUCAGCCAUGAA |
| 568 | UGUAGGGUCAGCCAUGAAA |
| 569 | GUAGGGUCAGCCAUGAAAA |
| 570 | UAGGGUCAGCCAUGAAAAA |
| 571 | AGGGUCAGCCAUGAAAAAC |
| 572 | GGGUCAGCCAUGAAAAACA |
| 573 | GGUCAGCCAUGAAAAACAG |
| 574 | GUCAGCCAUGAAAAACAGC |
| 575 | UCAGCCAUGAAAAACAGCC |
| 576 | CAGCCAUGAAAAACAGCCU |
| 577 | AGCCAUGAAAAACAGCCUU |
| 578 | GCCAUGAAAAACAGCCUUC |
| 579 | CCAUGAAAAACAGCCUUCG |
| 580 | CAUGAAAAACAGCCUUCGA |
| 581 | AUGAAAAACAGCCUUCGAA |
| 582 | UGAAAAACAGCCUUCGAAG |
| 583 | GAAAAACAGCCUUCGAAGC |
| 584 | AAAAACAGCCUUCGAAGCC |
| 585 | AAAACAGCCUUCGAAGCCU |
| 586 | AAACAGCCUUCGAAGCCUC |
| 587 | AACAGCCUUCGAAGCCUCC |
| 588 | ACAGCCUUCGAAGCCUCCC |
| 589 | CAGCCUUCGAAGCCUCCCA |
| 590 | AGCCUUCGAAGCCUCCCAG |
| 591 | GCCUUCGAAGCCUCCCAGC |
| 592 | CCUUCGAAGCCUCCCAGCA |
| 593 | CUUCGAAGCCUCCCAGCAA |
| 594 | UUCGAAGCCUCCCAGCAAC |
| 595 | UCGAAGCCUCCCAGCAACA |
| 596 | CGAAGCCUCCCAGCAACAU |
| 597 | GAAGCCUCCCAGCAACAUA |
| 598 | AAGCCUCCCAGCAACAUAC |
| 599 | AGCCUCCCAGCAACAUACA |
| 600 | GCCUCCCAGCAACAUACAU |
| 601 | CCUCCCAGCAACAUACAUG |
| 602 | CUCCCAGCAACAUACAUGU |
| 603 | UCCCAGCAACAUACAUGUC |
| 604 | CCCAGCAACAUACAUGUCA |
| 605 | CCAGCAACAUACAUGUCAA |
| 606 | CAGCAACAUACAUGUCAAG |
| 607 | AGCAACAUACAUGUCAAGC |
| 608 | GCAACAUACAUGUCAAGCC |
| 609 | CAACAUACAUGUCAAGCCA |
| 610 | AACAUACAUGUCAAGCCAG |
| 611 | ACAUACAUGUCAAGCCAGU |
| 612 | CAUACAUGUCAAGCCAGUC |
| 613 | AUACAUGUCAAGCCAGUCA |
| 614 | UACAUGUCAAGCCAGUCAG |
| 615 | ACAUGUCAAGCCAGUCAGG |
| 616 | CAUGUCAAGCCAGUCAGGA |
| 617 | AUGUCAAGCCAGUCAGGAA |
| 618 | UGUCAAGCCAGUCAGGAAA |
| 619 | GUCAAGCCAGUCAGGAAAA |
| 620 | UCAAGCCAGUCAGGAAAAC |
| 621 | CAAGCCAGUCAGGAAAACA |
| 622 | AAGCCAGUCAGGAAAACAG |
| 623 | AGCCAGUCAGGAAAACAGU |
| 624 | GCCAGUCAGGAAAACAGUG |
| 625 | CCAGUCAGGAAAACAGUGG |
| 626 | CAGUCAGGAAAACAGUGGC |
| 627 | AGUCAGGAAAACAGUGGCA |
| 628 | GUCAGGAAAACAGUGGCAG |
| 629 | UCAGGAAAACAGUGGCAGA |
| 630 | CAGGAAAACAGUGGCAGAU |
| 631 | AGGAAAACAGUGGCAGAUG |
| 632 | GGAAAACAGUGGCAGAUGA |
| 633 | GAAAACAGUGGCAGAUGAA |
| 634 | AAAACAGUGGCAGAUGAAG |
| 635 | AAACAGUGGCAGAUGAAGG |
| 636 | AACAGUGGCAGAUGAAGGG |
| 637 | ACAGUGGCAGAUGAAGGGA |
| 638 | CAGUGGCAGAUGAAGGGAA |
| 639 | AGUGGCAGAUGAAGGGAAU |
| 640 | GUGGCAGAUGAAGGGAAUG |
| 641 | UGGCAGAUGAAGGGAAUGG |
| 642 | GGCAGAUGAAGGGAAUGGA |
| 643 | GCAGAUGAAGGGAAUGGAG |
| 644 | CAGAUGAAGGGAAUGGAGA |
| 645 | AGAUGAAGGGAAUGGAGAA |
| 646 | GAUGAAGGGAAUGGAGAAC |
| 647 | AUGAAGGGAAUGGAGAACC |
| 648 | UGAAGGGAAUGGAGAACCG |
| 649 | GAAGGGAAUGGAGAACCGC |
| 650 | AAGGGAAUGGAGAACCGCC |
| 651 | AGGGAAUGGAGAACCGCCA |
| 652 | GGGAAUGGAGAACCGCCAU |
| 653 | GGAAUGGAGAACCGCCAUG |
| 654 | GAAUGGAGAACCGCCAUGC |
| 655 | AAUGGAGAACCGCCAUGCC |
| 656 | AUGGAGAACCGCCAUGCCA |
| 657 | UGGAGAACCGCCAUGCCAU |
| 658 | GGAGAACCGCCAUGCCAUG |
| 659 | GAGAACCGCCAUGCCAUGA |
| 660 | AGAACCGCCAUGCCAUGAG |
| 661 | GAACCGCCAUGCCAUGAGC |
| 662 | AACCGCCAUGCCAUGAGCU |
| 663 | ACCGCCAUGCCAUGAGCUC |
| 664 | CCGCCAUGCCAUGAGCUCC |
| 665 | CGCCAUGCCAUGAGCUCCC |
| 666 | GCCAUGCCAUGAGCUCCCA |
| 667 | CCAUGCCAUGAGCUCCCAG |
| 668 | CAUGCCAUGAGCUCCCAGU |
| 669 | AUGCCAUGAGCUCCCAGUA |
| 670 | UGCCAUGAGCUCCCAGUAC |
| 671 | GCCAUGAGCUCCCAGUACC |
| 672 | CCAUGAGCUCCCAGUACCG |
| 673 | CAUGAGCUCCCAGUACCGG |
| 674 | AUGAGCUCCCAGUACCGGA |
| 675 | UGAGCUCCCAGUACCGGAU |
| 676 | GAGCUCCCAGUACCGGAUG |
| 677 | AGCUCCCAGUACCGGAUGU |
| 678 | GCUCCCAGUACCGGAUGUG |
| 679 | CUCCCAGUACCGGAUGUGC |
| 680 | UCCCAGUACCGGAUGUGCU |
| 681 | CCCAGUACCGGAUGUGCUC |
| 682 | CCAGUACCGGAUGUGCUCC |
| 683 | CAGUACCGGAUGUGCUCCU |
| 684 | AGUACCGGAUGUGCUCCUA |
| 685 | GUACCGGAUGUGCUCCUAC |
| 686 | UACCGGAUGUGCUCCUACU |
| 687 | ACCGGAUGUGCUCCUACUA |
| 688 | CCGGAUGUGCUCCUACUAC |
| 689 | CGGAUGUGCUCCUACUACC |
| 690 | GGAUGUGCUCCUACUACCC |
| 691 | GAUGUGCUCCUACUACCCG |
| 692 | AUGUGCUCCUACUACCCGC |
| 693 | UGUGCUCCUACUACCCGCC |
| 694 | GUGCUCCUACUACCCGCCC |
| 695 | UGCUCCUACUACCCGCCCA |
| 696 | GCUCCUACUACCCGCCCAC |
| 697 | CUCCUACUACCCGCCCACC |
| 698 | UCCUACUACCCGCCCACCU |
| 699 | CCUACUACCCGCCCACCUC |
| 700 | CUACUACCCGCCCACCUCA |
| 701 | UACUACCCGCCCACCUCAU |
| 702 | ACUACCCGCCCACCUCAUA |
| 703 | CUACCCGCCCACCUCAUAC |
| 704 | UACCCGCCCACCUCAUACC |
| 705 | ACCCGCCCACCUCAUACCU |
| 706 | CCCGCCCACCUCAUACCUG |
| 707 | CCGCCCACCUCAUACCUGG |
| 708 | CGCCCACCUCAUACCUGGG |
| 709 | GCCCACCUCAUACCUGGGC |
| 710 | CCCACCUCAUACCUGGGCC |
| 711 | CCACCUCAUACCUGGGCCA |
| 712 | CACCUCAUACCUGGGCCAG |
| 713 | ACCUCAUACCUGGGCCAGG |
| 714 | CCUCAUACCUGGGCCAGGG |
| 715 | CUCAUACCUGGGCCAGGGG |
| 716 | UCAUACCUGGGCCAGGGGG |
| 717 | CAUACCUGGGCCAGGGGGU |
| 718 | AUACCUGGGCCAGGGGGUU |
| 719 | UACCUGGGCCAGGGGGUUG |
| 720 | ACCUGGGCCAGGGGGUUGG |
| 721 | CCUGGGCCAGGGGGUUGGC |
| 722 | CUGGGCCAGGGGGUUGGCA |
| 723 | UGGGCCAGGGGGUUGGCAG |
| 724 | GGGCCAGGGGGUUGGCAGU |
| 725 | GGCCAGGGGGUUGGCAGUC |
| 726 | GCCAGGGGGUUGGCAGUCC |
| 727 | CCAGGGGGUUGGCAGUCCC |
| 728 | CAGGGGGUUGGCAGUCCCA |
| 729 | AGGGGGUUGGCAGUCCCAC |
| 730 | GGGGGUUGGCAGUCCCACC |
| 731 | GGGGUUGGCAGUCCCACCU |
| 732 | GGGUUGGCAGUCCCACCUG |
| 733 | GGUUGGCAGUCCCACCUGC |
| 734 | GUUGGCAGUCCCACCUGCG |
| 735 | UUGGCAGUCCCACCUGCGU |
| 736 | UGGCAGUCCCACCUGCGUC |
| 737 | GGCAGUCCCACCUGCGUCA |
| 738 | GCAGUCCCACCUGCGUCAC |
| 739 | CAGUCCCACCUGCGUCACA |
| 740 | AGUCCCACCUGCGUCACAC |
| 741 | GUCCCACCUGCGUCACACA |
| 742 | UCCCACCUGCGUCACACAG |
| 743 | CCCACCUGCGUCACACAGA |
| 744 | CCACCUGCGUCACACAGAU |
| 745 | CACCUGCGUCACACAGAUA |
| 746 | ACCUGCGUCACACAGAUAC |
| 747 | CCUGCGUCACACAGAUACU |
| 748 | CUGCGUCACACAGAUACUG |
| 749 | UGCGUCACACAGAUACUGG |
| 750 | GCGUCACACAGAUACUGGC |
| 751 | CGUCACACAGAUACUGGCC |
| 752 | GUCACACAGAUACUGGCCU |
| 753 | UCACACAGAUACUGGCCUC |
| 754 | CACACAGAUACUGGCCUCG |
| 755 | ACACAGAUACUGGCCUCGG |
| 756 | CACAGAUACUGGCCUCGGA |
| 757 | ACAGAUACUGGCCUCGGAG |
| 758 | CAGAUACUGGCCUCGGAGG |
| 759 | AGAUACUGGCCUCGGAGGA |
| 760 | GAUACUGGCCUCGGAGGAC |
| 761 | AUACUGGCCUCGGAGGACA |
| 762 | UACUGGCCUCGGAGGACAC |
| 763 | ACUGGCCUCGGAGGACACC |
| 764 | CUGGCCUCGGAGGACACCC |
| 765 | UGGCCUCGGAGGACACCCC |
| 766 | GGCCUCGGAGGACACCCCC |
| 767 | GCCUCGGAGGACACCCCCU |
| 768 | CCUCGGAGGACACCCCCUC |
| 769 | CUCGGAGGACACCCCCUCC |
| 770 | UCGGAGGACACCCCCUCCU |
| 771 | CGGAGGACACCCCCUCCUA |
| 772 | GGAGGACACCCCCUCCUAC |
| 773 | GAGGACACCCCCUCCUACU |
| 774 | AGGACACCCCCUCCUACUC |
| 775 | GGACACCCCCUCCUACUCA |
| 776 | GACACCCCCUCCUACUCAG |
| 777 | ACACCCCCUCCUACUCAGA |
| 778 | CACCCCCUCCUACUCAGAG |
| 779 | ACCCCCUCCUACUCAGAGU |
| 780 | CCCCCUCCUACUCAGAGUC |
| 781 | CCCCUCCUACUCAGAGUCG |
| 782 | CCCUCCUACUCAGAGUCGA |
| 783 | CCUCCUACUCAGAGUCGAA |
| 784 | CUCCUACUCAGAGUCGAAA |
| 785 | UCCUACUCAGAGUCGAAAG |
| 786 | CCUACUCAGAGUCGAAAGC |
| 787 | CUACUCAGAGUCGAAAGCG |
| 788 | UACUCAGAGUCGAAAGCGA |
| 789 | ACUCAGAGUCGAAAGCGAG |
| 790 | CUCAGAGUCGAAAGCGAGA |
| 791 | UCAGAGUCGAAAGCGAGAG |
| 792 | CAGAGUCGAAAGCGAGAGU |
| 793 | AGAGUCGAAAGCGAGAGUG |
| 794 | GAGUCGAAAGCGAGAGUGU |
| 795 | AGUCGAAAGCGAGAGUGUU |
| 796 | GUCGAAAGCGAGAGUGUUU |
| 797 | UCGAAAGCGAGAGUGUUUU |
| 798 | CGAAAGCGAGAGUGUUUUC |
| 799 | GAAAGCGAGAGUGUUUUCG |
| 800 | AAAGCGAGAGUGUUUUCGC |
| 801 | AAGCGAGAGUGUUUUCGCC |
| 802 | AGCGAGAGUGUUUUCGCCG |
| 803 | GCGAGAGUGUUUUCGCCGC |
| 804 | CGAGAGUGUUUUCGCCGCC |
| 805 | GAGAGUGUUUUCGCCGCCC |
| 806 | AGAGUGUUUUCGCCGCCCA |
| 807 | GAGUGUUUUCGCCGCCCAG |
| 808 | AGUGUUUUCGCCGCCCAGC |
| 809 | GUGUUUUCGCCGCCCAGCA |
| 810 | UGUUUUCGCCGCCCAGCAG |
| 811 | GUUUUCGCCGCCCAGCAGC |
| 812 | UUUUCGCCGCCCAGCAGCC |
| 813 | UUUCGCCGCCCAGCAGCCA |
| 814 | UUCGCCGCCCAGCAGCCAG |
| 815 | UCGCCGCCCAGCAGCCAGG |
| 816 | CGCCGCCCAGCAGCCAGGA |
| 817 | GCCGCCCAGCAGCCAGGAC |
| 818 | CCGCCCAGCAGCCAGGACU |
| 819 | CGCCCAGCAGCCAGGACUC |
| 820 | GCCCAGCAGCCAGGACUCG |
| 821 | CCCAGCAGCCAGGACUCGG |
| 822 | CCAGCAGCCAGGACUCGGG |
| 823 | CAGCAGCCAGGACUCGGGC |
| 824 | AGCAGCCAGGACUCGGGCC |
| 825 | GCAGCCAGGACUCGGGCCU |
| 826 | CAGCCAGGACUCGGGCCUG |
| 827 | AGCCAGGACUCGGGCCUGG |
| 828 | GCCAGGACUCGGGCCUGGG |
| 829 | CCAGGACUCGGGCCUGGGG |
| 830 | CAGGACUCGGGCCUGGGGU |
| 831 | AGGACUCGGGCCUGGGGUG |
| 832 | GGACUCGGGCCUGGGGUGC |
| 833 | GACUCGGGCCUGGGGUGCC |
| 834 | ACUCGGGCCUGGGGUGCCU |
| 835 | CUCGGGCCUGGGGUGCCUG |
| 836 | UCGGGCCUGGGGUGCCUGU |
| 837 | CGGGCCUGGGGUGCCUGUC |
| 838 | GGGCCUGGGGUGCCUGUCG |
| 839 | GGCCUGGGGUGCCUGUCGA |
| 840 | GCCUGGGGUGCCUGUCGAG |
| 841 | CCUGGGGUGCCUGUCGAGC |
| 842 | CUGGGGUGCCUGUCGAGCA |
| 843 | UGGGGUGCCUGUCGAGCAG |
| 844 | GGGGUGCCUGUCGAGCAGC |
| 845 | GGGUGCCUGUCGAGCAGCG |
| 846 | GGUGCCUGUCGAGCAGCGA |
| 847 | GUGCCUGUCGAGCAGCGAG |
| 848 | UGCCUGUCGAGCAGCGAGA |
| 849 | GCCUGUCGAGCAGCGAGAG |
| 850 | CCUGUCGAGCAGCGAGAGC |
| 851 | CUGUCGAGCAGCGAGAGCA |
| 852 | UGUCGAGCAGCGAGAGCAC |
| 853 | GUCGAGCAGCGAGAGCACC |
| 854 | UCGAGCAGCGAGAGCACCA |
| 855 | CGAGCAGCGAGAGCACCAA |
| 856 | GAGCAGCGAGAGCACCAAG |
| 857 | AGCAGCGAGAGCACCAAGG |
| 858 | GCAGCGAGAGCACCAAGGG |
| 859 | CAGCGAGAGCACCAAGGGA |
| 860 | AGCGAGAGCACCAAGGGAG |
| 861 | GCGAGAGCACCAAGGGAGA |
| 862 | CGAGAGCACCAAGGGAGAC |
| 863 | GAGAGCACCAAGGGAGACC |
| 864 | AGAGCACCAAGGGAGACCU |
| 865 | GAGCACCAAGGGAGACCUG |
| 866 | AGCACCAAGGGAGACCUGG |
| 867 | GCACCAAGGGAGACCUGGA |
| 868 | CACCAAGGGAGACCUGGAG |
| 869 | ACCAAGGGAGACCUGGAGU |
| 870 | CCAAGGGAGACCUGGAGUG |
| 871 | CAAGGGAGACCUGGAGUGC |
| 872 | AAGGGAGACCUGGAGUGCG |
| 873 | AGGGAGACCUGGAGUGCGA |
| 874 | GGGAGACCUGGAGUGCGAG |
| 875 | GGAGACCUGGAGUGCGAGC |
| 876 | GAGACCUGGAGUGCGAGCC |
| 877 | AGACCUGGAGUGCGAGCCC |
| 878 | GACCUGGAGUGCGAGCCCC |
| 879 | ACCUGGAGUGCGAGCCCCA |
| 880 | CCUGGAGUGCGAGCCCCAC |
| 881 | CUGGAGUGCGAGCCCCACC |
| 882 | UGGAGUGCGAGCCCCACCA |
| 883 | GGAGUGCGAGCCCCACCAA |
| 884 | GAGUGCGAGCCCCACCAAG |
| 885 | AGUGCGAGCCCCACCAAGA |
| 886 | GUGCGAGCCCCACCAAGAG |
| 887 | UGCGAGCCCCACCAAGAGC |
| 888 | GCGAGCCCCACCAAGAGCC |
| 889 | CGAGCCCCACCAAGAGCCC |
| 890 | GAGCCCCACCAAGAGCCCG |
| 891 | AGCCCCACCAAGAGCCCGG |
| 892 | GCCCCACCAAGAGCCCGGC |
| 893 | CCCCACCAAGAGCCCGGCG |
| 894 | CCCACCAAGAGCCCGGCGC |
| 895 | CCACCAAGAGCCCGGCGCC |
| 896 | CACCAAGAGCCCGGCGCCU |
| 897 | ACCAAGAGCCCGGCGCCUU |
| 898 | CCAAGAGCCCGGCGCCUUC |
| 899 | CAAGAGCCCGGCGCCUUCG |
| 900 | AAGAGCCCGGCGCCUUCGC |
| 901 | AGAGCCCGGCGCCUUCGCG |
| 902 | GAGCCCGGCGCCUUCGCGG |
| 903 | AGCCCGGCGCCUUCGCGGU |
| 904 | GCCCGGCGCCUUCGCGGUG |
| 905 | CCCGGCGCCUUCGCGGUGA |
| 906 | CCGGCGCCUUCGCGGUGAG |
| 907 | CGGCGCCUUCGCGGUGAGC |
| 908 | GGCGCCUUCGCGGUGAGCC |
| 909 | GCGCCUUCGCGGUGAGCCC |
| 910 | CGCCUUCGCGGUGAGCCCG |
| 911 | GCCUUCGCGGUGAGCCCGG |
| 912 | CCUUCGCGGUGAGCCCGGU |
| 913 | CUUCGCGGUGAGCCCGGUU |
| 914 | UUCGCGGUGAGCCCGGUUC |
| 915 | UCGCGGUGAGCCCGGUUCU |
| 916 | CGCGGUGAGCCCGGUUCUU |
| 917 | GCGGUGAGCCCGGUUCUUG |
| 918 | CGGUGAGCCCGGUUCUUGA |
| 919 | GGUGAGCCCGGUUCUUGAG |
| 920 | GUGAGCCCGGUUCUUGAGG |
| 921 | UGAGCCCGGUUCUUGAGGG |
| 922 | GAGCCCGGUUCUUGAGGGC |
| 923 | AGCCCGGUUCUUGAGGGCG |
| 924 | GCCCGGUUCUUGAGGGCGA |
| 925 | CCCGGUUCUUGAGGGCGAG |
| 926 | CCGGUUCUUGAGGGCGAGU |
| 927 | CGGUUCUUGAGGGCGAGUA |
| 928 | GGUUCUUGAGGGCGAGUAG |
| 929 | GUUCUUGAGGGCGAGUAGG |
| 930 | UUCUUGAGGGCGAGUAGGC |
| 931 | UCUUGAGGGCGAGUAGGCG |
| 932 | CUUGAGGGCGAGUAGGCGC |
| 933 | UUGAGGGCGAGUAGGCGCG |
| 934 | UGAGGGCGAGUAGGCGCGG |
| 935 | GAGGGCGAGUAGGCGCGGC |
| 936 | AGGGCGAGUAGGCGCGGCG |
| 937 | GGGCGAGUAGGCGCGGCGU |
| 938 | GGCGAGUAGGCGCGGCGUC |
| 939 | GCGAGUAGGCGCGGCGUCG |
| 940 | CGAGUAGGCGCGGCGUCGG |
| 941 | GAGUAGGCGCGGCGUCGGG |
| 942 | AGUAGGCGCGGCGUCGGGC |
| 943 | GUAGGCGCGGCGUCGGGCG |
| 944 | UAGGCGCGGCGUCGGGCGG |
| 945 | AGGCGCGGCGUCGGGCGGC |
| 946 | GGCGCGGCGUCGGGCGGCU |
| 947 | GCGCGGCGUCGGGCGGCUG |
| 948 | CGCGGCGUCGGGCGGCUGC |
| 949 | GCGGCGUCGGGCGGCUGCU |
| 950 | CGGCGUCGGGCGGCUGCUG |
| 951 | GGCGUCGGGCGGCUGCUGC |
| 952 | GCGUCGGGCGGCUGCUGCG |
| 953 | CGUCGGGCGGCUGCUGCGC |
| 954 | GUCGGGCGGCUGCUGCGCG |
| 955 | UCGGGCGGCUGCUGCGCGG |
| 956 | CGGGCGGCUGCUGCGCGGC |
| 957 | GGGCGGCUGCUGCGCGGCG |
| 958 | GGCGGCUGCUGCGCGGCGU |
| 959 | GCGGCUGCUGCGCGGCGUU |
| 960 | CGGCUGCUGCGCGGCGUUC |
| 961 | GGCUGCUGCGCGGCGUUCA |
| 962 | GCUGCUGCGCGGCGUUCAC |
| 963 | CUGCUGCGCGGCGUUCACU |
| 964 | UGCUGCGCGGCGUUCACUG |
| 965 | GCUGCGCGGCGUUCACUGU |
| 966 | CUGCGCGGCGUUCACUGUU |
| 967 | UGCGCGGCGUUCACUGUUG |
| 968 | GCGCGGCGUUCACUGUUGC |
| 969 | CGCGGCGUUCACUGUUGCC |
| 970 | GCGGCGUUCACUGUUGCCU |
| 971 | CGGCGUUCACUGUUGCCUU |
| 972 | GGCGUUCACUGUUGCCUUG |
| 973 | GCGUUCACUGUUGCCUUGU |
| 974 | CGUUCACUGUUGCCUUGUU |
| 975 | GUUCACUGUUGCCUUGUUC |
| 976 | UUCACUGUUGCCUUGUUCU |
| 977 | UCACUGUUGCCUUGUUCUG |
| 978 | CACUGUUGCCUUGUUCUGU |
| 979 | ACUGUUGCCUUGUUCUGUU |
| 980 | CUGUUGCCUUGUUCUGUUG |
| 981 | UGUUGCCUUGUUCUGUUGG |
| 982 | GUUGCCUUGUUCUGUUGGG |
| 983 | UUGCCUUGUUCUGUUGGGG |
| 984 | UGCCUUGUUCUGUUGGGGU |
| 985 | GCCUUGUUCUGUUGGGGUU |
| 986 | CCUUGUUCUGUUGGGGUUG |
| 987 | CUUGUUCUGUUGGGGUUGC |
| 988 | UUGUUCUGUUGGGGUUGCG |
| 989 | UGUUCUGUUGGGGUUGCGG |
| 990 | GUUCUGUUGGGGUUGCGGG |
| 991 | UUCUGUUGGGGUUGCGGGG |
| 992 | UCUGUUGGGGUUGCGGGGG |
| 993 | CUGUUGGGGUUGCGGGGGG |
| 994 | UGUUGGGGUUGCGGGGGGG |
| 995 | GUUGGGGUUGCGGGGGGGC |
| 996 | UUGGGGUUGCGGGGGGGCG |
| 997 | UGGGGUUGCGGGGGGGCGU |
| 998 | GGGGUUGCGGGGGGGCGUU |
| 999 | GGGUUGCGGGGGGGCGUUG |
| 1000 | GGUUGCGGGGGGGCGUUGG |
| 1001 | GUUGCGGGGGGGCGUUGGG |
| 1002 | UUGCGGGGGGGCGUUGGGU |
| 1003 | UGCGGGGGGGCGUUGGGUU |
| 1004 | GCGGGGGGGCGUUGGGUUU |
| 1005 | CGGGGGGGCGUUGGGUUUC |
| 1006 | GGGGGGGCGUUGGGUUUCU |
| 1007 | GGGGGGCGUUGGGUUUCUU |
| 1008 | GGGGGCGUUGGGUUUCUUC |
| 1009 | GGGGCGUUGGGUUUCUUCU |
| 1010 | GGGCGUUGGGUUUCUUCUU |
| 1011 | GGCGUUGGGUUUCUUCUUU |
| 1012 | GCGUUGGGUUUCUUCUUUC |
| 1013 | CGUUGGGUUUCUUCUUUCC |
| 1014 | GUUGGGUUUCUUCUUUCCG |
| 1015 | UUGGGUUUCUUCUUUCCGG |
| 1016 | UGGGUUUCUUCUUUCCGGG |
| 1017 | GGGUUUCUUCUUUCCGGGG |
| 1018 | GGUUUCUUCUUUCCGGGGC |
| 1019 | GUUUCUUCUUUCCGGGGCG |
| 1020 | UUUCUUCUUUCCGGGGCGG |
| 1021 | UUCUUCUUUCCGGGGCGGG |
| 1022 | UCUUCUUUCCGGGGCGGGG |
| 1023 | CUUCUUUCCGGGGCGGGGG |
| 1024 | UUCUUUCCGGGGCGGGGGG |
| 1025 | UCUUUCCGGGGCGGGGGGG |
| 1026 | CUUUCCGGGGCGGGGGGGG |
| 1027 | UUUCCGGGGCGGGGGGGGC |
| 1028 | UUCCGGGGCGGGGGGGGCA |
| 1029 | UCCGGGGCGGGGGGGGCAC |
| 1030 | CCGGGGCGGGGGGGGCACG |
| 1031 | CGGGGCGGGGGGGGCACGG |
| 1032 | GGGGCGGGGGGGGCACGGC |
| 1033 | GGGCGGGGGGGGCACGGCG |
| 1034 | GGCGGGGGGGGCACGGCGG |
| 1035 | GCGGGGGGGGCACGGCGGG |
| 1036 | CGGGGGGGGCACGGCGGGG |
| 1037 | GGGGGGGGCACGGCGGGGC |
| 1038 | GGGGGGGCACGGCGGGGCC |
| 1039 | GGGGGGCACGGCGGGGCCG |
| 1040 | GGGGGCACGGCGGGGCCGC |
| 1041 | GGGGCACGGCGGGGCCGCG |
| 1042 | GGGCACGGCGGGGCCGCGG |
| 1043 | GGCACGGCGGGGCCGCGGC |
| 1044 | GCACGGCGGGGCCGCGGCC |
| 1045 | CACGGCGGGGCCGCGGCCG |
| 1046 | ACGGCGGGGCCGCGGCCGG |
| 1047 | CGGCGGGGCCGCGGCCGGG |
| 1048 | GGCGGGGCCGCGGCCGGGC |
| 1049 | GCGGGGCCGCGGCCGGGCC |
| 1050 | CGGGGCCGCGGCCGGGCCG |
| 1051 | GGGGCCGCGGCCGGGCCGG |
| 1052 | GGGCCGCGGCCGGGCCGGC |
| 1053 | GGCCGCGGCCGGGCCGGCG |
| 1054 | GCCGCGGCCGGGCCGGCGG |
| 1055 | CCGCGGCCGGGCCGGCGGG |
| 1056 | CGCGGCCGGGCCGGCGGGG |
| 1057 | GCGGCCGGGCCGGCGGGGC |
| 1058 | CGGCCGGGCCGGCGGGGCG |
| 1059 | GGCCGGGCCGGCGGGGCGG |
| 1060 | GCCGGGCCGGCGGGGCGGG |
| 1061 | CCGGGCCGGCGGGGCGGGG |
| 1062 | CGGGCCGGCGGGGCGGGGC |
| 1063 | GGGCCGGCGGGGCGGGGCG |
| 1064 | GGCCGGCGGGGCGGGGCGG |
| 1065 | GCCGGCGGGGCGGGGCGGG |
| 1066 | CCGGCGGGGCGGGGCGGGG |
| 1067 | CGGCGGGGCGGGGCGGGGC |
| 1068 | GGCGGGGCGGGGCGGGGCG |
| 1069 | GCGGGGCGGGGCGGGGCGG |
| 1070 | CGGGGCGGGGCGGGGCGGG |
| 1071 | GGGGCGGGGCGGGGCGGGA |
| 1072 | GGGCGGGGCGGGGCGGGAC |
| 1073 | GGCGGGGCGGGGCGGGACG |
| 1074 | GCGGGGCGGGGCGGGACGG |
| 1075 | CGGGGCGGGGCGGGACGGG |
| 1076 | GGGGCGGGGCGGGACGGGG |
| 1077 | GGGCGGGGCGGGACGGGGC |
| 1078 | GGCGGGGCGGGACGGGGCG |
| 1079 | GCGGGGCGGGACGGGGCGG |
| 1080 | CGGGGCGGGACGGGGCGGG |
| 1081 | GGGGCGGGACGGGGCGGGG |
| 1082 | GGGCGGGACGGGGCGGGGC |
| 1083 | GGCGGGACGGGGCGGGGCG |
| 1084 | GCGGGACGGGGCGGGGCGG |
| 1085 | CGGGACGGGGCGGGGCGGA |
| 1086 | GGGACGGGGCGGGGCGGAG |
| 1087 | GGACGGGGCGGGGCGGAGC |
| 1088 | GACGGGGCGGGGCGGAGCC |
| 1089 | ACGGGGCGGGGCGGAGCCG |
| 1090 | CGGGGCGGGGCGGAGCCGC |
| 1091 | GGGGCGGGGCGGAGCCGCG |
| 1092 | GGGCGGGGCGGAGCCGCGC |
| 1093 | GGCGGGGCGGAGCCGCGCG |
| 1094 | GCGGGGCGGAGCCGCGCGG |
| 1095 | CGGGGCGGAGCCGCGCGGG |
| 1096 | GGGGCGGAGCCGCGCGGGG |
| 1097 | GGGCGGAGCCGCGCGGGGG |
| 1098 | GGCGGAGCCGCGCGGGGGC |
| 1099 | GCGGAGCCGCGCGGGGGCC |
| 1100 | CGGAGCCGCGCGGGGGCCG |
| 1101 | GGAGCCGCGCGGGGGCCGC |
| 1102 | GAGCCGCGCGGGGGCCGCA |
| 1103 | AGCCGCGCGGGGGCCGCAG |
| 1104 | GCCGCGCGGGGGCCGCAGU |
| 1105 | CCGCGCGGGGGCCGCAGUC |
| 1106 | CGCGCGGGGGCCGCAGUCC |
| 1107 | GCGCGGGGGCCGCAGUCCG |
| 1108 | CGCGGGGGCCGCAGUCCGG |
| 1109 | GCGGGGGCCGCAGUCCGGG |
| 1110 | CGGGGGCCGCAGUCCGGGC |
| 1111 | GGGGGCCGCAGUCCGGGCC |
| 1112 | GGGGCCGCAGUCCGGGCCG |
| 1113 | GGGCCGCAGUCCGGGCCGG |
| 1114 | GGCCGCAGUCCGGGCCGGG |
| 1115 | GCCGCAGUCCGGGCCGGGG |
| 1116 | CCGCAGUCCGGGCCGGGGC |
| 1117 | CGCAGUCCGGGCCGGGGCC |
| 1118 | GCAGUCCGGGCCGGGGCCG |
| 1119 | CAGUCCGGGCCGGGGCCGC |
| 1120 | AGUCCGGGCCGGGGCCGCC |
| 1121 | GUCCGGGCCGGGGCCGCCG |
| 1122 | UCCGGGCCGGGGCCGCCGU |
| 1123 | CCGGGCCGGGGCCGCCGUC |
| 1124 | CGGGCCGGGGCCGCCGUCG |
| 1125 | GGGCCGGGGCCGCCGUCGG |
| 1126 | GGCCGGGGCCGCCGUCGGG |
| 1127 | GCCGGGGCCGCCGUCGGGU |
| 1128 | CCGGGGCCGCCGUCGGGUC |
| 1129 | CGGGGCCGCCGUCGGGUCU |
| 1130 | GGGGCCGCCGUCGGGUCUC |
| 1131 | GGGCCGCCGUCGGGUCUCG |
| 1132 | GGCCGCCGUCGGGUCUCGG |
| 1133 | GCCGCCGUCGGGUCUCGGC |
| 1134 | CCGCCGUCGGGUCUCGGCC |
| 1135 | CGCCGUCGGGUCUCGGCCC |
| 1136 | GCCGUCGGGUCUCGGCCCG |
| 1137 | CCGUCGGGUCUCGGCCCGC |
| 1138 | CGUCGGGUCUCGGCCCGCU |
| 1139 | GUCGGGUCUCGGCCCGCUC |
| 1140 | UCGGGUCUCGGCCCGCUCC |
| 1141 | CGGGUCUCGGCCCGCUCCC |
| 1142 | GGGUCUCGGCCCGCUCCCG |
| 1143 | GGUCUCGGCCCGCUCCCGU |
| 1144 | GUCUCGGCCCGCUCCCGUC |
| 1145 | UCUCGGCCCGCUCCCGUCG |
| 1146 | CUCGGCCCGCUCCCGUCGG |
| 1147 | UCGGCCCGCUCCCGUCGGG |
| 1148 | CGGCCCGCUCCCGUCGGGG |
| 1149 | GGCCCGCUCCCGUCGGGGC |
| 1150 | GCCCGCUCCCGUCGGGGCG |
| 1151 | CCCGCUCCCGUCGGGGCGG |
| 1152 | CCGCUCCCGUCGGGGCGGA |
| 1153 | CGCUCCCGUCGGGGCGGAG |
| 1154 | GCUCCCGUCGGGGCGGAGC |
| 1155 | CUCCCGUCGGGGCGGAGCG |
| 1156 | UCCCGUCGGGGCGGAGCGU |
| 1157 | CCCGUCGGGGCGGAGCGUC |
| 1158 | CCGUCGGGGCGGAGCGUCC |
| 1159 | CGUCGGGGCGGAGCGUCCG |
| 1160 | GUCGGGGCGGAGCGUCCGA |
| 1161 | UCGGGGCGGAGCGUCCGAC |
| 1162 | CGGGGCGGAGCGUCCGACG |
| 1163 | GGGGCGGAGCGUCCGACGA |
| 1164 | GGGCGGAGCGUCCGACGAU |
| 1165 | GGCGGAGCGUCCGACGAUC |
| 1166 | GCGGAGCGUCCGACGAUCG |
| 1167 | CGGAGCGUCCGACGAUCGG |
| 1168 | GGAGCGUCCGACGAUCGGC |
| 1169 | GAGCGUCCGACGAUCGGCC |
| 1170 | AGCGUCCGACGAUCGGCCU |
| 1171 | GCGUCCGACGAUCGGCCUC |
| 1172 | CGUCCGACGAUCGGCCUCC |
| 1173 | GUCCGACGAUCGGCCUCCA |
| 1174 | UCCGACGAUCGGCCUCCAC |
| 1175 | CCGACGAUCGGCCUCCACG |
| 1176 | CGACGAUCGGCCUCCACGA |
| 1177 | GACGAUCGGCCUCCACGAA |
| 1178 | ACGAUCGGCCUCCACGAAA |
| 1179 | CGAUCGGCCUCCACGAAAC |
| 1180 | GAUCGGCCUCCACGAAACG |
| 1181 | AUCGGCCUCCACGAAACGC |
| 1182 | UCGGCCUCCACGAAACGCG |
| 1183 | CGGCCUCCACGAAACGCGG |
| 1184 | GGCCUCCACGAAACGCGGU |
| 1185 | GCCUCCACGAAACGCGGUG |
| 1186 | CCUCCACGAAACGCGGUGC |
| 1187 | CUCCACGAAACGCGGUGCC |
| 1188 | UCCACGAAACGCGGUGCCG |
| 1189 | CCACGAAACGCGGUGCCGU |
| 1190 | CACGAAACGCGGUGCCGUG |
| 1191 | ACGAAACGCGGUGCCGUGA |
| 1192 | CGAAACGCGGUGCCGUGAU |
| 1193 | GAAACGCGGUGCCGUGAUG |
| 1194 | AAACGCGGUGCCGUGAUGU |
| 1195 | AACGCGGUGCCGUGAUGUG |
| 1196 | ACGCGGUGCCGUGAUGUGU |
| 1197 | CGCGGUGCCGUGAUGUGUU |
| 1198 | GCGGUGCCGUGAUGUGUUU |
| 1199 | CGGUGCCGUGAUGUGUUUG |
| 1200 | GGUGCCGUGAUGUGUUUGU |
| 1201 | GUGCCGUGAUGUGUUUGUA |
| 1202 | UGCCGUGAUGUGUUUGUAG |
| 1203 | GCCGUGAUGUGUUUGUAGU |
| 1204 | CCGUGAUGUGUUUGUAGUG |
| 1205 | CGUGAUGUGUUUGUAGUGG |
| 1206 | GUGAUGUGUUUGUAGUGGU |
| 1207 | UGAUGUGUUUGUAGUGGUU |
| 1208 | GAUGUGUUUGUAGUGGUUC |
| 1209 | AUGUGUUUGUAGUGGUUCC |
| 1210 | UGUGUUUGUAGUGGUUCCU |
| 1211 | GUGUUUGUAGUGGUUCCUC |
| 1212 | UGUUUGUAGUGGUUCCUCG |
| 1213 | GUUUGUAGUGGUUCCUCGU |
| 1214 | UUUGUAGUGGUUCCUCGUA |
| 1215 | UUGUAGUGGUUCCUCGUAG |
| 1216 | UGUAGUGGUUCCUCGUAGG |
| 1217 | GUAGUGGUUCCUCGUAGGC |
| 1218 | UAGUGGUUCCUCGUAGGCU |
| 1219 | AGUGGUUCCUCGUAGGCUC |
| 1220 | GUGGUUCCUCGUAGGCUCC |
| 1221 | UGGUUCCUCGUAGGCUCCA |
| 1222 | GGUUCCUCGUAGGCUCCAG |
| 1223 | GUUCCUCGUAGGCUCCAGA |
| 1224 | UUCCUCGUAGGCUCCAGAC |
| 1225 | UCCUCGUAGGCUCCAGACG |
| 1226 | CCUCGUAGGCUCCAGACGU |
| 1227 | CUCGUAGGCUCCAGACGUU |
| 1228 | UCGUAGGCUCCAGACGUUU |
| 1229 | CGUAGGCUCCAGACGUUUU |
| 1230 | GUAGGCUCCAGACGUUUUC |
| 1231 | UAGGCUCCAGACGUUUUCU |
| 1232 | AGGCUCCAGACGUUUUCUC |
| 1233 | GGCUCCAGACGUUUUCUCC |
| 1234 | GCUCCAGACGUUUUCUCCU |
| 1235 | CUCCAGACGUUUUCUCCUC |
| 1236 | UCCAGACGUUUUCUCCUCG |
| 1237 | CCAGACGUUUUCUCCUCGU |
| 1238 | CAGACGUUUUCUCCUCGUA |
| 1239 | AGACGUUUUCUCCUCGUAU |
| 1240 | GACGUUUUCUCCUCGUAUC |
| 1241 | ACGUUUUCUCCUCGUAUCG |
| 1242 | CGUUUUCUCCUCGUAUCGC |
| 1243 | GUUUUCUCCUCGUAUCGCC |
| 1244 | UUUUCUCCUCGUAUCGCCA |
| 1245 | UUUCUCCUCGUAUCGCCAA |
| 1246 | UUCUCCUCGUAUCGCCAAA |
| 1247 | UCUCCUCGUAUCGCCAAAU |
| 1248 | CUCCUCGUAUCGCCAAAUU |
| 1249 | UCCUCGUAUCGCCAAAUUA |
| 1250 | CCUCGUAUCGCCAAAUUAA |
| 1251 | CUCGUAUCGCCAAAUUAAC |
| 1252 | UCGUAUCGCCAAAUUAACG |
| 1253 | CGUAUCGCCAAAUUAACGC |
| 1254 | GUAUCGCCAAAUUAACGCG |
| 1255 | UAUCGCCAAAUUAACGCGU |
| 1256 | AUCGCCAAAUUAACGCGUU |
| 1257 | UCGCCAAAUUAACGCGUUU |
| 1258 | CGCCAAAUUAACGCGUUUU |
| 1259 | GCCAAAUUAACGCGUUUUG |
| 1260 | CCAAAUUAACGCGUUUUGC |
| 1261 | CAAAUUAACGCGUUUUGCA |
| 1262 | AAAUUAACGCGUUUUGCAU |
| 1263 | AAUUAACGCGUUUUGCAUA |
| 1264 | AUUAACGCGUUUUGCAUAU |
| 1265 | UUAACGCGUUUUGCAUAUU |
| 1266 | UAACGCGUUUUGCAUAUUA |
| 1267 | AACGCGUUUUGCAUAUUAC |
| 1268 | ACGCGUUUUGCAUAUUACA |
| 1269 | CGCGUUUUGCAUAUUACAG |
| 1270 | GCGUUUUGCAUAUUACAGU |
| 1271 | CGUUUUGCAUAUUACAGUU |
| 1272 | GUUUUGCAUAUUACAGUUG |
| 1273 | UUUUGCAUAUUACAGUUGA |
| 1274 | UUUGCAUAUUACAGUUGAG |
| 1275 | UUGCAUAUUACAGUUGAGU |
| 1276 | UGCAUAUUACAGUUGAGUG |
| 1277 | GCAUAUUACAGUUGAGUGC |
| 1278 | CAUAUUACAGUUGAGUGCC |
| 1279 | AUAUUACAGUUGAGUGCCU |
| 1280 | UAUUACAGUUGAGUGCCUC |
| 1281 | AUUACAGUUGAGUGCCUCG |
| 1282 | UUACAGUUGAGUGCCUCGA |
| 1283 | UACAGUUGAGUGCCUCGAC |
| 1284 | ACAGUUGAGUGCCUCGACU |
| 1285 | CAGUUGAGUGCCUCGACUU |
| 1286 | AGUUGAGUGCCUCGACUUA |
| 1287 | GUUGAGUGCCUCGACUUAG |
| 1288 | UUGAGUGCCUCGACUUAGA |
| 1289 | UGAGUGCCUCGACUUAGAU |
| 1290 | GAGUGCCUCGACUUAGAUU |
| 1291 | AGUGCCUCGACUUAGAUUG |
| 1292 | GUGCCUCGACUUAGAUUGC |
| 1293 | UGCCUCGACUUAGAUUGCA |
| 1294 | GCCUCGACUUAGAUUGCAA |
| 1295 | CCUCGACUUAGAUUGCAAU |
| 1296 | CUCGACUUAGAUUGCAAUA |
| 1297 | UCGACUUAGAUUGCAAUAU |
| 1298 | CGACUUAGAUUGCAAUAUA |
| 1299 | GACUUAGAUUGCAAUAUAA |
| 1300 | ACUUAGAUUGCAAUAUAAG |
| 1301 | CUUAGAUUGCAAUAUAAGC |
| 1302 | UUAGAUUGCAAUAUAAGCG |
| 1303 | UAGAUUGCAAUAUAAGCGG |
| 1304 | AGAUUGCAAUAUAAGCGGC |
| 1305 | GAUUGCAAUAUAAGCGGCC |
| 1306 | AUUGCAAUAUAAGCGGCCA |
| 1307 | UUGCAAUAUAAGCGGCCAG |
| 1308 | UGCAAUAUAAGCGGCCAGC |
| 1309 | GCAAUAUAAGCGGCCAGCA |
| 1310 | CAAUAUAAGCGGCCAGCAA |
| 1311 | AAUAUAAGCGGCCAGCAAA |
| 1312 | AUAUAAGCGGCCAGCAAAC |
| 1313 | UAUAAGCGGCCAGCAAACA |
| 1314 | AUAAGCGGCCAGCAAACAA |
| 1315 | UAAGCGGCCAGCAAACAAG |
| 1316 | AAGCGGCCAGCAAACAAGU |
| 1317 | AGCGGCCAGCAAACAAGUC |
| 1318 | GCGGCCAGCAAACAAGUCU |
| 1319 | CGGCCAGCAAACAAGUCUC |
| 1320 | GGCCAGCAAACAAGUCUCA |
| 1321 | GCCAGCAAACAAGUCUCAA |
| 1322 | CCAGCAAACAAGUCUCAAA |
| 1323 | CAGCAAACAAGUCUCAAAA |
| 1324 | AGCAAACAAGUCUCAAAAA |
| 1325 | GCAAACAAGUCUCAAAAAA |
| 1326 | CAAACAAGUCUCAAAAAAA |
| 1327 | AAACAAGUCUCAAAAAAAA |
| 1328 | AACAAGUCUCAAAAAAAAG |
| 1329 | ACAAGUCUCAAAAAAAAGU |
| 1330 | CAAGUCUCAAAAAAAAGUU |
| 1331 | AAGUCUCAAAAAAAAGUUA |
| 1332 | AGUCUCAAAAAAAAGUUAC |
| 1333 | GUCUCAAAAAAAAGUUACG |
| 1334 | UCUCAAAAAAAAGUUACGU |
| 1335 | CUCAAAAAAAAGUUACGUG |
| 1336 | UCAAAAAAAAGUUACGUGC |
| 1337 | CAAAAAAAAGUUACGUGCG |
| 1338 | AAAAAAAAGUUACGUGCGU |
| 1339 | AAAAAAAGUUACGUGCGUU |
| 1340 | AAAAAAGUUACGUGCGUUU |
| 1341 | AAAAAGUUACGUGCGUUUC |
| 1342 | AAAAGUUACGUGCGUUUCU |
| 1343 | AAAGUUACGUGCGUUUCUG |
| 1344 | AAGUUACGUGCGUUUCUGC |
| 1345 | AGUUACGUGCGUUUCUGCG |
| 1346 | GUUACGUGCGUUUCUGCGA |
| 1347 | UUACGUGCGUUUCUGCGAG |
| 1348 | UACGUGCGUUUCUGCGAGU |
| 1349 | ACGUGCGUUUCUGCGAGUG |
| 1350 | CGUGCGUUUCUGCGAGUGU |
| 1351 | GUGCGUUUCUGCGAGUGUU |
| 1352 | UGCGUUUCUGCGAGUGUUA |
| 1353 | GCGUUUCUGCGAGUGUUAU |
| 1354 | CGUUUCUGCGAGUGUUAUU |
| 1355 | GUUUCUGCGAGUGUUAUUU |
| 1356 | UUUCUGCGAGUGUUAUUUU |
| 1357 | UUCUGCGAGUGUUAUUUUG |
| 1358 | UCUGCGAGUGUUAUUUUGU |
| 1359 | CUGCGAGUGUUAUUUUGUU |
| 1360 | UGCGAGUGUUAUUUUGUUA |
| 1361 | GCGAGUGUUAUUUUGUUAA |
| 1362 | CGAGUGUUAUUUUGUUAAG |
| 1363 | GAGUGUUAUUUUGUUAAGA |
| 1364 | AGUGUUAUUUUGUUAAGAA |
| 1365 | GUGUUAUUUUGUUAAGAAC |
| 1366 | UGUUAUUUUGUUAAGAACG |
| 1367 | GUUAUUUUGUUAAGAACGG |
| 1368 | UUAUUUUGUUAAGAACGGC |
| 1369 | UAUUUUGUUAAGAACGGCU |
| 1370 | AUUUUGUUAAGAACGGCUC |
| 1371 | UUUUGUUAAGAACGGCUCA |
| 1372 | UUUGUUAAGAACGGCUCAC |
| 1373 | UUGUUAAGAACGGCUCACA |
| 1374 | UGUUAAGAACGGCUCACAG |
| 1375 | GUUAAGAACGGCUCACAGU |
| 1376 | UUAAGAACGGCUCACAGUG |
| 1377 | UAAGAACGGCUCACAGUGU |
| 1378 | AAGAACGGCUCACAGUGUC |
| 1379 | AGAACGGCUCACAGUGUCC |
| 1380 | GAACGGCUCACAGUGUCCU |
| 1381 | AACGGCUCACAGUGUCCUC |
| 1382 | ACGGCUCACAGUGUCCUCU |
| 1383 | CGGCUCACAGUGUCCUCUU |
| 1384 | GGCUCACAGUGUCCUCUUC |
| 1385 | GCUCACAGUGUCCUCUUCC |
| 1386 | CUCACAGUGUCCUCUUCCU |
| 1387 | UCACAGUGUCCUCUUCCUG |
| 1388 | CACAGUGUCCUCUUCCUGU |
| 1389 | ACAGUGUCCUCUUCCUGUG |
| 1390 | CAGUGUCCUCUUCCUGUGU |
| 1391 | AGUGUCCUCUUCCUGUGUU |
| 1392 | GUGUCCUCUUCCUGUGUUA |
| 1393 | UGUCCUCUUCCUGUGUUAC |
| 1394 | GUCCUCUUCCUGUGUUACA |
| 1395 | UCCUCUUCCUGUGUUACAG |
| 1396 | CCUCUUCCUGUGUUACAGA |
| 1397 | CUCUUCCUGUGUUACAGAA |
| 1398 | UCUUCCUGUGUUACAGAAG |
| 1399 | CUUCCUGUGUUACAGAAGC |
| 1400 | UUCCUGUGUUACAGAAGCC |
| 1401 | UCCUGUGUUACAGAAGCCA |
| 1402 | CCUGUGUUACAGAAGCCAA |
| 1403 | CUGUGUUACAGAAGCCAAC |
| 1404 | UGUGUUACAGAAGCCAACC |
| 1405 | GUGUUACAGAAGCCAACCU |
| 1406 | UGUUACAGAAGCCAACCUG |
| 1407 | GUUACAGAAGCCAACCUGA |
| 1408 | UUACAGAAGCCAACCUGAA |
| 1409 | UACAGAAGCCAACCUGAAA |
| 1410 | ACAGAAGCCAACCUGAAAU |
| 1411 | CAGAAGCCAACCUGAAAUG |
| 1412 | AGAAGCCAACCUGAAAUGA |
| 1413 | GAAGCCAACCUGAAAUGAA |
| 1414 | AAGCCAACCUGAAAUGAAA |
| 1415 | AGCCAACCUGAAAUGAAAC |
| 1416 | GCCAACCUGAAAUGAAACU |
| 1417 | CCAACCUGAAAUGAAACUA |
| 1418 | CAACCUGAAAUGAAACUAG |
| 1419 | AACCUGAAAUGAAACUAGU |
| 1420 | ACCUGAAAUGAAACUAGUC |
| 1421 | CCUGAAAUGAAACUAGUCU |
| 1422 | CUGAAAUGAAACUAGUCUG |
| 1423 | UGAAAUGAAACUAGUCUGG |
| 1424 | GAAAUGAAACUAGUCUGGA |
| 1425 | AAAUGAAACUAGUCUGGAA |
| 1426 | AAUGAAACUAGUCUGGAAA |
| 1427 | AUGAAACUAGUCUGGAAAA |
| 1428 | UGAAACUAGUCUGGAAAAA |
| 1429 | GAAACUAGUCUGGAAAAAU |
| 1430 | AAACUAGUCUGGAAAAAUU |
| 1431 | AACUAGUCUGGAAAAAUUC |
| 1432 | ACUAGUCUGGAAAAAUUCA |
| 1433 | CUAGUCUGGAAAAAUUCAU |
| 1434 | UAGUCUGGAAAAAUUCAUU |
| 1435 | AGUCUGGAAAAAUUCAUUG |
| 1436 | GUCUGGAAAAAUUCAUUGU |
| 1437 | UCUGGAAAAAUUCAUUGUU |
| 1438 | CUGGAAAAAUUCAUUGUUC |
| 1439 | UGGAAAAAUUCAUUGUUCU |
| 1440 | GGAAAAAUUCAUUGUUCUC |
| 1441 | GAAAAAUUCAUUGUUCUCU |
| 1442 | AAAAAUUCAUUGUUCUCUG |
| 1443 | AAAAUUCAUUGUUCUCUGU |
| 1444 | AAAUUCAUUGUUCUCUGUA |
| 1445 | AAUUCAUUGUUCUCUGUAG |
| 1446 | AUUCAUUGUUCUCUGUAGU |
| 1447 | UUCAUUGUUCUCUGUAGUU |
| 1448 | UCAUUGUUCUCUGUAGUUG |
| 1449 | CAUUGUUCUCUGUAGUUGC |
| 1450 | AUUGUUCUCUGUAGUUGCA |
| 1451 | UUGUUCUCUGUAGUUGCAG |
| 1452 | UGUUCUCUGUAGUUGCAGC |
| 1453 | GUUCUCUGUAGUUGCAGCU |
| 1454 | UUCUCUGUAGUUGCAGCUG |
| 1455 | UCUCUGUAGUUGCAGCUGU |
| 1456 | CUCUGUAGUUGCAGCUGUA |
| 1457 | UCUGUAGUUGCAGCUGUAC |
| 1458 | CUGUAGUUGCAGCUGUACC |
| 1459 | UGUAGUUGCAGCUGUACCU |
| 1460 | GUAGUUGCAGCUGUACCUG |
| 1461 | UAGUUGCAGCUGUACCUGA |
| 1462 | AGUUGCAGCUGUACCUGAA |
| 1463 | GUUGCAGCUGUACCUGAAA |
| 1464 | UUGCAGCUGUACCUGAAAU |
| 1465 | UGCAGCUGUACCUGAAAUA |
| 1466 | GCAGCUGUACCUGAAAUAA |
| 1467 | CAGCUGUACCUGAAAUAAA |
| 1468 | AGCUGUACCUGAAAUAAAA |
| 1469 | GCUGUACCUGAAAUAAAAA |
| 1470 | CUGUACCUGAAAUAAAAAU |
| 1471 | UGUACCUGAAAUAAAAAUG |
| 1472 | GUACCUGAAAUAAAAAUGU |
| 1473 | UACCUGAAAUAAAAAUGUU |
| 1474 | ACCUGAAAUAAAAAUGUUA |
| 1475 | CCUGAAAUAAAAAUGUUAU |
| 1476 | CUGAAAUAAAAAUGUUAUU |
| 1477 | UGAAAUAAAAAUGUUAUUG |
| 1478 | GAAAUAAAAAUGUUAUUGA |
| 1479 | AAAUAAAAAUGUUAUUGAU |
| 1480 | AAUAAAAAUGUUAUUGAUG |
| 1481 | AUAAAAAUGUUAUUGAUGA |
| 1482 | UAAAAAUGUUAUUGAUGAC |
| 1483 | AAAAAUGUUAUUGAUGACU |
| 1484 | AAAAUGUUAUUGAUGACUG |
| 1485 | AAAUGUUAUUGAUGACUGA |
| 1486 | AAUGUUAUUGAUGACUGAA |
| 1487 | AUGUUAUUGAUGACUGAAA |
| 1488 | UGUUAUUGAUGACUGAAAA |
| 1489 | GUUAUUGAUGACUGAAAAA |
| 1490 | UUAUUGAUGACUGAAAAAA |
| 1491 | UAUUGAUGACUGAAAAAAA |
| 1492 | AUUGAUGACUGAAAAAAAA |
| 1493 | UUGAUGACUGAAAAAAAA |
| 1494 | UGAUGACUGAAAAAAAAA |
| 1495 | GAUGACUGAAAAAAAAAA |
| 1496 | AUGACUGAAAAAAAAAAA |
| 1497 | UGACUGAAAAAAAAAAAA |
| 1498 | GACUGAAAAAAAAAAAAA |
| 1499 | ACUGAAAAAAAAAAAAAA |
| 1500 | CUGAAAAAAAAAAAAAAA |
| 1501 | UGAAAAAAAAAAAAAAAA |
| 1502 | AAAACAGUGGCAGAUGAAA |
| 1503 | AAACAGUGGCAGAUGAAAG |
| 1504 | AACAGUGGCAGAUGAAAGG |
| 1505 | ACAGUGGCAGAUGAAAGGG |
| 1506 | CAGUGGCAGAUGAAAGGGA |
| 1507 | AGUGGCAGAUGAAAGGGAU |
| 1508 | GUGGCAGAUGAAAGGGAUG |
| 1509 | UGGCAGAUGAAAGGGAUGG |
| 1510 | GGCAGAUGAAAGGGAUGGA |
| 1511 | GCAGAUGAAAGGGAUGGAG |
| 1512 | CAGAUGAAAGGGAUGGAGA |
| 1513 | AGAUGAAAGGGAUGGAGAA |
| 1514 | GAUGAAAGGGAUGGAGAAC |
| 1515 | AUGAAAGGGAUGGAGAACC |
| 1516 | UGAAAGGGAUGGAGAACCG |
| 1517 | GAAAGGGAUGGAGAACCGC |
| 1518 | AAAGGGAUGGAGAACCGCC |
| 1519 | AAGGGAUGGAGAACCGCCA |
| 1520 | AGGGAUGGAGAACCGCCAU |
| 1521 | GGGAUGGAGAACCGCCAUG |
| 1522 | GGAUGGAGAACCGCCAUGC |
| 1523 | GAUGGAGAACCGCCAUGCC |
| 1524 | AUGCCCGGUGACUCCCCGG |
| 1525 | UGCCCGGUGACUCCCCGGC |
| 1526 | GCCCGGUGACUCCCCGGCC |
| 1527 | CCCGGUGACUCCCCGGCCG |
| 1528 | CCGGUGACUCCCCGGCCGU |
| 1529 | CGGUGACUCCCCGGCCGUC |
| 1530 | GGUGACUCCCCGGCCGUCA |
| 1531 | GUGACUCCCCGGCCGUCAG |
| 1532 | UGACUCCCCGGCCGUCAGC |
| 1533 | GACUCCCCGGCCGUCAGCA |
| 1534 | ACUCCCCGGCCGUCAGCAA |
| 1535 | CUCCCCGGCCGUCAGCAAG |
| 1536 | UCCCCGGCCGUCAGCAAGC |
| 1537 | CCCCGGCCGUCAGCAAGCC |
| 1538 | CCCGGCCGUCAGCAAGCCC |
| 1539 | CCGGCCGUCAGCAAGCCCC |
| 1540 | CGGCCGUCAGCAAGCCCCC |
| 1541 | GGCCGUCAGCAAGCCCCCG |
| 1542 | GCCGUCAGCAAGCCCCCGG |
| 1543 | CCGUCAGCAAGCCCCCGGA |
| 1544 | CGUCAGCAAGCCCCCGGAC |
| 1545 | GUCAGCAAGCCCCCGGACG |
| 1546 | UCAGCAAGCCCCCGGACGG |
| 1547 | CAGCAAGCCCCCGGACGGC |
| 1548 | AGCAAGCCCCCGGACGGCG |
| 1549 | GCAAGCCCCCGGACGGCGC |
| 1550 | CAAGCCCCCGGACGGCGCC |
| 1551 | AAGCCCCCGGACGGCGCCG |
| 1552 | AGCCCCCGGACGGCGCCGG |
| 1553 | GCCCCCGGACGGCGCCGGG |
| 1554 | CCCCCGGACGGCGCCGGGC |
| 1555 | CCCCGGACGGCGCCGGGCC |
| 1556 | CCCGGACGGCGCCGGGCCG |
| 1557 | CCGGACGGCGCCGGGCCGG |
| 1558 | CGGACGGCGCCGGGCCGGG |
| 1559 | GGACGGCGCCGGGCCGGGG |
| 1560 | GACGGCGCCGGGCCGGGGG |
| 1561 | ACGGCGCCGGGCCGGGGGA |
| 1562 | CGGCGCCGGGCCGGGGGAC |
| 1563 | GGCGCCGGGCCGGGGGACA |
| 1564 | GCGCCGGGCCGGGGGACAA |
| 1565 | CGCCGGGCCGGGGGACAAG |
| 1566 | GCCGGGCCGGGGGACAAGG |
| 1567 | CCGGGCCGGGGGACAAGGC |
| 1568 | CGGGCCGGGGGACAAGGCG |
| 1569 | GGGCCGGGGGACAAGGCGG |
| 1570 | GGCCGGGGGACAAGGCGGG |
| 1571 | GCCGGGGGACAAGGCGGGC |
| 1572 | CCGGGGGACAAGGCGGGCG |
| 1573 | CGGGGGACAAGGCGGGCGG |
| 1574 | GGGGGACAAGGCGGGCGGC |
| 1575 | GGGGACAAGGCGGGCGGCC |
| 1576 | GGGACAAGGCGGGCGGCCU |
| 1577 | GGACAAGGCGGGCGGCCUC |
| 1578 | GACAAGGCGGGCGGCCUCG |
| 1579 | ACAAGGCGGGCGGCCUCGG |
| 1580 | CAAGGCGGGCGGCCUCGGC |
| 1581 | AAGGCGGGCGGCCUCGGCA |
| 1582 | AGGCGGGCGGCCUCGGCAA |
| 1583 | GGCGGGCGGCCUCGGCAAG |
| 1584 | GCGGGCGGCCUCGGCAAGG |
| 1585 | CGGGCGGCCUCGGCAAGGC |
| 1586 | GGGCGGCCUCGGCAAGGCG |
| 1587 | GGCGGCCUCGGCAAGGCGG |
| 1588 | GCGGCCUCGGCAAGGCGGC |
| 1589 | CGGCCUCGGCAAGGCGGCG |
| 1590 | GGCCUCGGCAAGGCGGCGG |
| 1591 | GCCUCGGCAAGGCGGCGGC |
| 1592 | CCUCGGCAAGGCGGCGGCC |
| 1593 | CUCGGCAAGGCGGCGGCCC |
| 1594 | UCGGCAAGGCGGCGGCCCA |
| 1595 | CGGCAAGGCGGCGGCCCAA |
| 1596 | GGCAAGGCGGCGGCCCAAA |
| 1597 | GCAAGGCGGCGGCCCAAAU |
| 1598 | CAAGGCGGCGGCCCAAAUG |
| 1599 | AAGGCGGCGGCCCAAAUGG |
| 1600 | AGGCGGCGGCCCAAAUGGC |
| 1601 | GGCGGCGGCCCAAAUGGCG |
| 1602 | GCGGCGGCCCAAAUGGCGG |
| 1603 | CGGCGGCCCAAAUGGCGGC |
| 1604 | GGCGGCCCAAAUGGCGGCC |
| 1605 | GCGGCCCAAAUGGCGGCCG |
| 1606 | CGGCCCAAAUGGCGGCCGC |
| 1607 | GGCCCAAAUGGCGGCCGCC |
| 1608 | GCCCAAAUGGCGGCCGCCC |
| 1609 | CCCAAAUGGCGGCCGCCCC |
| 1610 | CCAAAUGGCGGCCGCCCCG |
| 1611 | CAAAUGGCGGCCGCCCCGG |
| 1612 | AAAUGGCGGCCGCCCCGGC |
| 1613 | AAUGGCGGCCGCCCCGGCG |
| 1614 | AUGGCGGCCGCCCCGGCGG |
| 1615 | UGGCGGCCGCCCCGGCGGC |
| 1616 | GGCGGCCGCCCCGGCGGCG |
| 1617 | GCGGCCGCCCCGGCGGCGG |
| 1618 | CGGCCGCCCCGGCGGCGGG |
| 1619 | GGCCGCCCCGGCGGCGGGC |
| 1620 | GCCGCCCCGGCGGCGGGCA |
| 1621 | CCGCCCCGGCGGCGGGCAA |
| 1622 | CGCCCCGGCGGCGGGCAAG |
| 1623 | GCCCCGGCGGCGGGCAAGA |
| 1624 | CCCCGGCGGCGGGCAAGAA |
| 1625 | CCCGGCGGCGGGCAAGAAG |
| 1626 | GGCAGCGGGUGAUGGCCGC |
| 1627 | GCAGCGGGUGAUGGCCGCG |
| 1628 | CAGCGGGUGAUGGCCGCGC |
| 1629 | AGCGGGUGAUGGCCGCGCA |
| 1630 | GCGGGUGAUGGCCGCGCAG |
| 1631 | CGGGUGAUGGCCGCGCAGG |
| 1632 | GGGUGAUGGCCGCGCAGGU |
| 1633 | GGUGAUGGCCGCGCAGGUU |
| 1634 | GUGAUGGCCGCGCAGGUUG |
| 1635 | UGAUGGCCGCGCAGGUUGC |
| 1636 | GAUGGCCGCGCAGGUUGCA |
| 1637 | AUGGCCGCGCAGGUUGCAC |
| 1638 | UGGCCGCGCAGGUUGCACU |
| 1639 | GGCCGCGCAGGUUGCACUG |
| 1640 | GCCGCGCAGGUUGCACUGA |
| 1641 | CCGCGCAGGUUGCACUGAG |
| 1642 | CGCGCAGGUUGCACUGAGG |
| 1643 | GCGCAGGUUGCACUGAGGA |
| 1644 | CGCAGGUUGCACUGAGGAG |

TABLE 2
DsRNA molecules targeting mRNA encoding chicken
ASW (WPKCI).

| SEQ ID NO | Sequence 5′-3′ |
|---|---|
| 1645 | CGUCUGCGGGUGCCUUGCG |
| 1646 | GUCUGCGGGUGCCUUGCGA |
| 1647 | UCUGCGGGUGCCUUGCGAU |
| 1648 | CUGCGGGUGCCUUGCGAUA |
| 1649 | UGCGGGUGCCUUGCGAUAC |
| 1650 | GCGGGUGCCUUGCGAUACG |
| 1651 | CGGGUGCCUUGCGAUACGU |
| 1652 | GGGUGCCUUGCGAUACGUC |
| 1653 | GGUGCCUUGCGAUACGUCG |
| 1654 | GUGCCUUGCGAUACGUCGG |
| 1655 | UGCCUUGCGAUACGUCGGC |
| 1656 | GCCUUGCGAUACGUCGGCA |
| 1657 | CCUUGCGAUACGUCGGCAU |
| 1658 | CUUGCGAUACGUCGGCAUG |
| 1659 | UUGCGAUACGUCGGCAUGG |
| 1660 | UGCGAUACGUCGGCAUGGC |
| 1661 | GCGAUACGUCGGCAUGGCU |
| 1662 | CGAUACGUCGGCAUGGCUG |
| 1663 | GAUACGUCGGCAUGGCUGA |
| 1664 | AUACGUCGGCAUGGCUGAC |
| 1665 | UACGUCGGCAUGGCUGACG |
| 1666 | ACGUCGGCAUGGCUGACGA |
| 1667 | CGUCGGCAUGGCUGACGAG |
| 1668 | GUCGGCAUGGCUGACGAGA |
| 1669 | UCGGCAUGGCUGACGAGAU |
| 1670 | CGGCAUGGCUGACGAGAUC |
| 1671 | GGCAUGGCUGACGAGAUCC |
| 1672 | GCAUGGCUGACGAGAUCCG |
| 1673 | CAUGGCUGACGAGAUCCGC |
| 1674 | AUGGCUGACGAGAUCCGCA |
| 1675 | UGGCUGACGAGAUCCGCAA |
| 1676 | GGCUGACGAGAUCCGCAAG |
| 1677 | GCUGACGAGAUCCGCAAGG |
| 1678 | CUGACGAGAUCCGCAAGGC |
| 1679 | UGACGAGAUCCGCAAGGCG |
| 1680 | GACGAGAUCCGCAAGGCGC |
| 1681 | ACGAGAUCCGCAAGGCGCA |
| 1682 | CGAGAUCCGCAAGGCGCAG |
| 1683 | GAGAUCCGCAAGGCGCAGG |
| 1684 | AGAUCCGCAAGGCGCAGGC |
| 1685 | GAUCCGCAAGGCGCAGGCC |
| 1686 | AUCCGCAAGGCGCAGGCCG |
| 1687 | UCCGCAAGGCGCAGGCCGC |
| 1688 | CCGCAAGGCGCAGGCCGCG |
| 1689 | CGCAAGGCGCAGGCCGCGC |
| 1690 | GCAAGGCGCAGGCCGCGCG |
| 1691 | CAAGGCGCAGGCCGCGCGC |
| 1692 | AAGGCGCAGGCCGCGCGCC |
| 1693 | AGGCGCAGGCCGCGCGCCC |
| 1694 | GGCGCAGGCCGCGCGCCCU |
| 1695 | GCGCAGGCCGCGCGCCCUG |
| 1696 | CGCAGGCCGCGCGCCCUGG |
| 1697 | GCAGGCCGCGCGCCCUGGU |
| 1698 | CAGGCCGCGCGCCCUGGUG |
| 1699 | AGGCCGCGCGCCCUGGUGG |
| 1700 | GGCCGCGCGCCCUGGUGGG |
| 1701 | GCCGCGCGCCCUGGUGGGG |
| 1702 | CCGCGCGCCCUGGUGGGGA |
| 1703 | CGCGCGCCCUGGUGGGGAC |
| 1704 | GCGCGCCCUGGUGGGGACA |
| 1705 | CGCGCCCUGGUGGGGACAC |
| 1706 | GCGCCCUGGUGGGGACACC |
| 1707 | CGCCCUGGUGGGGACACCA |
| 1708 | GCCCUGGUGGGGACACCAU |
| 1709 | CCCUGGUGGGGACACCAUC |
| 1710 | CCUGGUGGGGACACCAUCU |
| 1711 | CUGGUGGGGACACCAUCUU |
| 1712 | UGGUGGGGACACCAUCUUC |
| 1713 | GGUGGGGACACCAUCUUCG |
| 1714 | GUGGGGACACCAUCUUCGG |
| 1715 | UGGGGACACCAUCUUCGGG |
| 1716 | GGGGACACCAUCUUCGGGA |
| 1717 | GGGACACCAUCUUCGGGAA |
| 1718 | GGACACCAUCUUCGGGAAG |
| 1719 | GACACCAUCUUCGGGAAGA |
| 1720 | ACACCAUCUUCGGGAAGAU |
| 1721 | CACCAUCUUCGGGAAGAUU |
| 1722 | ACCAUCUUCGGGAAGAUUA |
| 1723 | CCAUCUUCGGGAAGAUUAU |
| 1724 | CAUCUUCGGGAAGAUUAUC |
| 1725 | AUCUUCGGGAAGAUUAUCC |
| 1726 | UCUUCGGGAAGAUUAUCCG |
| 1727 | CUUCGGGAAGAUUAUCCGC |
| 1728 | UUCGGGAAGAUUAUCCGCA |
| 1729 | UCGGGAAGAUUAUCCGCAA |
| 1730 | CGGGAAGAUUAUCCGCAAG |
| 1731 | GGGAAGAUUAUCCGCAAGG |
| 1732 | GGAAGAUUAUCCGCAAGGA |
| 1733 | GAAGAUUAUCCGCAAGGAG |
| 1734 | AAGAUUAUCCGCAAGGAGA |
| 1735 | AGAUUAUCCGCAAGGAGAU |
| 1736 | GAUUAUCCGCAAGGAGAUU |
| 1737 | AUUAUCCGCAAGGAGAUUC |
| 1738 | UUAUCCGCAAGGAGAUUCC |
| 1739 | UAUCCGCAAGGAGAUUCCC |
| 1740 | AUCCGCAAGGAGAUUCCCG |
| 1741 | UCCGCAAGGAGAUUCCCGC |
| 1742 | CCGCAAGGAGAUUCCCGCC |
| 1743 | CGCAAGGAGAUUCCCGCCA |
| 1744 | GCAAGGAGAUUCCCGCCAA |
| 1745 | CAAGGAGAUUCCCGCCAAC |
| 1746 | AAGGAGAUUCCCGCCAACA |
| 1747 | AGGAGAUUCCCGCCAACAU |
| 1748 | GGAGAUUCCCGCCAACAUA |
| 1749 | GAGAUUCCCGCCAACAUAA |
| 1750 | AGAUUCCCGCCAACAUAAU |
| 1751 | GAUUCCCGCCAACAUAAUC |
| 1752 | AUUCCCGCCAACAUAAUCU |
| 1753 | UUCCCGCCAACAUAAUCUA |
| 1754 | UCCCGCCAACAUAAUCUAC |
| 1755 | CCCGCCAACAUAAUCUACG |
| 1756 | CCGCCAACAUAAUCUACGA |
| 1757 | CGCCAACAUAAUCUACGAG |
| 1758 | GCCAACAUAAUCUACGAGG |
| 1759 | CCAACAUAAUCUACGAGGA |
| 1760 | CAACAUAAUCUACGAGGAC |
| 1761 | AACAUAAUCUACGAGGACG |
| 1762 | ACAUAAUCUACGAGGACGA |
| 1763 | CAUAAUCUACGAGGACGAG |
| 1764 | AUAAUCUACGAGGACGAGC |
| 1765 | UAAUCUACGAGGACGAGCA |
| 1766 | AAUCUACGAGGACGAGCAG |
| 1767 | AUCUACGAGGACGAGCAGU |
| 1768 | UCUACGAGGACGAGCAGUG |
| 1769 | CUACGAGGACGAGCAGUGC |
| 1770 | UACGAGGACGAGCAGUGCC |
| 1771 | ACGAGGACGAGCAGUGCCU |
| 1772 | CGAGGACGAGCAGUGCCUU |
| 1773 | GAGGACGAGCAGUGCCUUG |
| 1774 | AGGACGAGCAGUGCCUUGC |
| 1775 | GGACGAGCAGUGCCUUGCG |
| 1776 | GACGAGCAGUGCCUUGCGU |
| 1777 | ACGAGCAGUGCCUUGCGUU |
| 1778 | CGAGCAGUGCCUUGCGUUC |
| 1779 | GAGCAGUGCCUUGCGUUCC |
| 1780 | AGCAGUGCCUUGCGUUCCA |
| 1781 | GCAGUGCCUUGCGUUCCAU |
| 1782 | CAGUGCCUUGCGUUCCAUG |
| 1783 | AGUGCCUUGCGUUCCAUGA |
| 1784 | GUGCCUUGCGUUCCAUGAU |
| 1785 | UGCCUUGCGUUCCAUGAUA |
| 1786 | GCCUUGCGUUCCAUGAUAU |
| 1787 | CCUUGCGUUCCAUGAUAUC |
| 1788 | CUUGCGUUCCAUGAUAUCU |
| 1789 | UUGCGUUCCAUGAUAUCUC |
| 1790 | UGCGUUCCAUGAUAUCUCA |
| 1791 | GCGUUCCAUGAUAUCUCAC |
| 1792 | CGUUCCAUGAUAUCUCACC |
| 1793 | GUUCCAUGAUAUCUCACCC |
| 1794 | UUCCAUGAUAUCUCACCCC |
| 1795 | UCCAUGAUAUCUCACCCCA |
| 1796 | CCAUGAUAUCUCACCCCAA |
| 1797 | CAUGAUAUCUCACCCCAAG |
| 1798 | AUGAUAUCUCACCCCAAGC |
| 1799 | UGAUAUCUCACCCCAAGCU |
| 1800 | GAUAUCUCACCCCAAGCUC |
| 1801 | AUAUCUCACCCCAAGCUCC |
| 1802 | UAUCUCACCCCAAGCUCCA |
| 1803 | AUCUCACCCCAAGCUCCAA |
| 1804 | UCUCACCCCAAGCUCCAAC |
| 1805 | CUCACCCCAAGCUCCAACG |
| 1806 | UCACCCCAAGCUCCAACGC |
| 1807 | CACCCCAAGCUCCAACGCA |
| 1808 | ACCCCAAGCUCCAACGCAU |
| 1809 | CCCCAAGCUCCAACGCAUU |
| 1810 | CCCAAGCUCCAACGCAUUU |
| 1811 | CCAAGCUCCAACGCAUUUU |
| 1812 | CAAGCUCCAACGCAUUUUC |
| 1813 | AAGCUCCAACGCAUUUUCU |
| 1814 | AGCUCCAACGCAUUUUCUA |
| 1815 | GCUCCAACGCAUUUUCUAG |
| 1816 | CUCCAACGCAUUUUCUAGU |
| 1817 | UCCAACGCAUUUUCUAGUG |
| 1818 | CCAACGCAUUUUCUAGUGA |
| 1819 | CAACGCAUUUUCUAGUGAU |
| 1820 | AACGCAUUUUCUAGUGAUU |
| 1821 | ACGCAUUUUCUAGUGAUUC |
| 1822 | CGCAUUUUCUAGUGAUUCC |
| 1823 | GCAUUUUCUAGUGAUUCCU |
| 1824 | CAUUUUCUAGUGAUUCCUA |
| 1825 | AUUUUCUAGUGAUUCCUAA |
| 1826 | UUUUCUAGUGAUUCCUAAG |
| 1827 | UUUCUAGUGAUUCCUAAGA |
| 1828 | UUCUAGUGAUUCCUAAGAA |
| 1829 | UCUAGUGAUUCCUAAGAAG |
| 1830 | CUAGUGAUUCCUAAGAAGC |
| 1831 | UAGUGAUUCCUAAGAAGCC |
| 1832 | AGUGAUUCCUAAGAAGCCA |
| 1833 | GUGAUUCCUAAGAAGCCAA |
| 1834 | UGAUUCCUAAGAAGCCAAU |
| 1835 | GAUUCCUAAGAAGCCAAUU |
| 1836 | AUUCCUAAGAAGCCAAUUG |
| 1837 | UUCCUAAGAAGCCAAUUGU |
| 1838 | UCCUAAGAAGCCAAUUGUC |
| 1839 | CCUAAGAAGCCAAUUGUCA |
| 1840 | CUAAGAAGCCAAUUGUCAG |
| 1841 | UAAGAAGCCAAUUGUCAGG |
| 1842 | AAGAAGCCAAUUGUCAGGU |
| 1843 | AGAAGCCAAUUGUCAGGUU |
| 1844 | GAAGCCAAUUGUCAGGUUA |
| 1845 | AAGCCAAUUGUCAGGUUAU |
| 1846 | AGCCAAUUGUCAGGUUAUC |
| 1847 | GCCAAUUGUCAGGUUAUCU |
| 1848 | CCAAUUGUCAGGUUAUCUG |
| 1849 | CAAUUGUCAGGUUAUCUGA |
| 1850 | AAUUGUCAGGUUAUCUGAA |
| 1851 | AUUGUCAGGUUAUCUGAAG |
| 1852 | UUGUCAGGUUAUCUGAAGC |
| 1853 | UGUCAGGUUAUCUGAAGCA |
| 1854 | GUCAGGUUAUCUGAAGCAG |
| 1855 | UCAGGUUAUCUGAAGCAGA |
| 1856 | CAGGUUAUCUGAAGCAGAA |
| 1857 | AGGUUAUCUGAAGCAGAAG |
| 1858 | GGUUAUCUGAAGCAGAAGA |
| 1859 | GUUAUCUGAAGCAGAAGAU |
| 1860 | UUAUCUGAAGCAGAAGAUU |
| 1861 | UAUCUGAAGCAGAAGAUUC |
| 1862 | AUCUGAAGCAGAAGAUUCU |
| 1863 | UCUGAAGCAGAAGAUUCUG |
| 1864 | CUGAAGCAGAAGAUUCUGA |
| 1865 | UGAAGCAGAAGAUUCUGAU |
| 1866 | GAAGCAGAAGAUUCUGAUG |
| 1867 | AAGCAGAAGAUUCUGAUGA |
| 1868 | AGCAGAAGAUUCUGAUGAA |
| 1869 | GCAGAAGAUUCUGAUGAAU |
| 1870 | CAGAAGAUUCUGAUGAAUC |
| 1871 | AGAAGAUUCUGAUGAAUCU |
| 1872 | GAAGAUUCUGAUGAAUCUC |
| 1873 | AAGAUUCUGAUGAAUCUCU |
| 1874 | AGAUUCUGAUGAAUCUCUU |
| 1875 | GAUUCUGAUGAAUCUCUUC |
| 1876 | AUUCUGAUGAAUCUCUUCU |
| 1877 | UUCUGAUGAAUCUCUUCUG |
| 1878 | UCUGAUGAAUCUCUUCUGG |
| 1879 | CUGAUGAAUCUCUUCUGGG |
| 1880 | UGAUGAAUCUCUUCUGGGG |
| 1881 | GAUGAAUCUCUUCUGGGGC |
| 1882 | AUGAAUCUCUUCUGGGGCA |
| 1883 | UGAAUCUCUUCUGGGGCAU |
| 1884 | GAAUCUCUUCUGGGGCAUU |
| 1885 | AAUCUCUUCUGGGGCAUUU |
| 1886 | AUCUCUUCUGGGGCAUUUA |
| 1887 | UCUCUUCUGGGGCAUUUAA |
| 1888 | CUCUUCUGGGGCAUUUAAU |
| 1889 | UCUUCUGGGGCAUUUAAUG |
| 1890 | CUUCUGGGGCAUUUAAUGA |
| 1891 | UUCUGGGGCAUUUAAUGAU |
| 1892 | UCUGGGGCAUUUAAUGAUU |
| 1893 | CUGGGGCAUUUAAUGAUUG |
| 1894 | UGGGGCAUUUAAUGAUUGU |
| 1895 | GGGGCAUUUAAUGAUUGUU |
| 1896 | GGGCAUUUAAUGAUUGUUG |
| 1897 | GGCAUUUAAUGAUUGUUGG |
| 1898 | GCAUUUAAUGAUUGUUGGC |
| 1899 | CAUUUAAUGAUUGUUGGCA |
| 1900 | AUUUAAUGAUUGUUGGCAA |
| 1901 | UUUAAUGAUUGUUGGCAAG |
| 1902 | UUAAUGAUUGUUGGCAAGA |
| 1903 | UAAUGAUUGUUGGCAAGAA |
| 1904 | AAUGAUUGUUGGCAAGAAG |
| 1905 | AUGAUUGUUGGCAAGAAGU |
| 1906 | UGAUUGUUGGCAAGAAGUG |
| 1907 | GAUUGUUGGCAAGAAGUGU |
| 1908 | AUUGUUGGCAAGAAGUGUG |
| 1909 | UUGUUGGCAAGAAGUGUGC |
| 1910 | UGUUGGCAAGAAGUGUGCU |
| 1911 | GUUGGCAAGAAGUGUGCUG |
| 1912 | UUGGCAAGAAGUGUGCUGC |
| 1913 | UGGCAAGAAGUGUGCUGCU |
| 1914 | GGCAAGAAGUGUGCUGCUA |
| 1915 | GCAAGAAGUGUGCUGCUAA |
| 1916 | CAAGAAGUGUGCUGCUAAC |
| 1917 | AAGAAGUGUGCUGCUAACC |
| 1918 | AGAAGUGUGCUGCUAACCU |
| 1919 | GAAGUGUGCUGCUAACCUG |
| 1920 | AAGUGUGCUGCUAACCUGG |
| 1921 | AGUGUGCUGCUAACCUGGG |
| 1922 | GUGUGCUGCUAACCUGGGC |
| 1923 | UGUGCUGCUAACCUGGGCC |
| 1924 | GUGCUGCUAACCUGGGCCU |
| 1925 | UGCUGCUAACCUGGGCCUG |
| 1926 | GCUGCUAACCUGGGCCUGA |
| 1927 | CUGCUAACCUGGGCCUGAC |
| 1928 | UGCUAACCUGGGCCUGACC |
| 1929 | GCUAACCUGGGCCUGACCA |
| 1930 | CUAACCUGGGCCUGACCAA |
| 1931 | UAACCUGGGCCUGACCAAU |
| 1932 | AACCUGGGCCUGACCAAUG |
| 1933 | ACCUGGGCCUGACCAAUGG |
| 1934 | CCUGGGCCUGACCAAUGGA |
| 1935 | CUGGGCCUGACCAAUGGAU |
| 1936 | UGGGCCUGACCAAUGGAUU |
| 1937 | GGGCCUGACCAAUGGAUUC |
| 1938 | GGCCUGACCAAUGGAUUCC |
| 1939 | GCCUGACCAAUGGAUUCCG |
| 1940 | CCUGACCAAUGGAUUCCGG |
| 1941 | CUGACCAAUGGAUUCCGGA |
| 1942 | UGACCAAUGGAUUCCGGAU |
| 1943 | GACCAAUGGAUUCCGGAUG |
| 1944 | ACCAAUGGAUUCCGGAUGG |
| 1945 | CCAAUGGAUUCCGGAUGGU |
| 1946 | CAAUGGAUUCCGGAUGGUU |
| 1947 | AAUGGAUUCCGGAUGGUUU |
| 1948 | AUGGAUUCCGGAUGGUUUU |
| 1949 | UGGAUUCCGGAUGGUUUUG |
| 1950 | GGAUUCCGGAUGGUUUUGA |
| 1951 | GAUUCCGGAUGGUUUUGAA |
| 1952 | AUUCCGGAUGGUUUUGAAU |
| 1953 | UUCCGGAUGGUUUUGAAUG |
| 1954 | UCCGGAUGGUUUUGAAUGA |
| 1955 | CCGGAUGGUUUUGAAUGAA |
| 1956 | CGGAUGGUUUUGAAUGAAG |
| 1957 | GGAUGGUUUUGAAUGAAGG |
| 1958 | GAUGGUUUUGAAUGAAGGG |
| 1959 | AUGGUUUUGAAUGAAGGGC |
| 1960 | UGGUUUUGAAUGAAGGGCC |
| 1961 | GGUUUUGAAUGAAGGGCCU |
| 1962 | GUUUUGAAUGAAGGGCCUG |
| 1963 | UUUUGAAUGAAGGGCCUGA |
| 1964 | UUUGAAUGAAGGGCCUGAG |
| 1965 | UUGAAUGAAGGGCCUGAGG |
| 1966 | UGAAUGAAGGGCCUGAGGG |
| 1967 | GAAUGAAGGGCCUGAGGGU |
| 1968 | AAUGAAGGGCCUGAGGGUG |
| 1969 | AUGAAGGGCCUGAGGGUGG |
| 1970 | UGAAGGGCCUGAGGGUGGG |
| 1971 | GAAGGGCCUGAGGGUGGGC |
| 1972 | AAGGGCCUGAGGGUGGGCA |
| 1973 | AGGGCCUGAGGGUGGGCAG |
| 1974 | GGGCCUGAGGGUGGGCAGU |
| 1975 | GGCCUGAGGGUGGGCAGUC |
| 1976 | GCCUGAGGGUGGGCAGUCU |
| 1977 | CCUGAGGGUGGGCAGUCUG |
| 1978 | CUGAGGGUGGGCAGUCUGU |
| 1979 | UGAGGGUGGGCAGUCUGUC |
| 1980 | GAGGGUGGGCAGUCUGUCU |
| 1981 | AGGGUGGGCAGUCUGUCUA |
| 1982 | GGGUGGGCAGUCUGUCUAU |
| 1983 | GGUGGGCAGUCUGUCUAUC |
| 1984 | GUGGGCAGUCUGUCUAUCA |
| 1985 | UGGGCAGUCUGUCUAUCAU |
| 1986 | GGGCAGUCUGUCUAUCAUG |
| 1987 | GGCAGUCUGUCUAUCAUGU |
| 1988 | GCAGUCUGUCUAUCAUGUA |
| 1989 | CAGUCUGUCUAUCAUGUAC |
| 1990 | AGUCUGUCUAUCAUGUACA |
| 1991 | GUCUGUCUAUCAUGUACAU |
| 1992 | UCUGUCUAUCAUGUACAUC |
| 1993 | CUGUCUAUCAUGUACAUCU |
| 1994 | UGUCUAUCAUGUACAUCUC |
| 1995 | GUCUAUCAUGUACAUCUCC |
| 1996 | UCUAUCAUGUACAUCUCCA |
| 1997 | CUAUCAUGUACAUCUCCAU |
| 1998 | UAUCAUGUACAUCUCCAUA |
| 1999 | AUCAUGUACAUCUCCAUAU |
| 2000 | UCAUGUACAUCUCCAUAUU |
| 2001 | CAUGUACAUCUCCAUAUUC |
| 2002 | AUGUACAUCUCCAUAUUCU |
| 2003 | UGUACAUCUCCAUAUUCUG |
| 2004 | GUACAUCUCCAUAUUCUGG |
| 2005 | UACAUCUCCAUAUUCUGGG |
| 2006 | ACAUCUCCAUAUUCUGGGA |
| 2007 | CAUCUCCAUAUUCUGGGAG |
| 2008 | AUCUCCAUAUUCUGGGAGG |
| 2009 | UCUCCAUAUUCUGGGAGGU |
| 2010 | CUCCAUAUUCUGGGAGGUC |
| 2011 | UCCAUAUUCUGGGAGGUCG |
| 2012 | CCAUAUUCUGGGAGGUCGU |
| 2013 | CAUAUUCUGGGAGGUCGUC |
| 2014 | AUAUUCUGGGAGGUCGUCA |
| 2015 | UAUUCUGGGAGGUCGUCAG |
| 2016 | AUUCUGGGAGGUCGUCAGU |
| 2017 | UUCUGGGAGGUCGUCAGUU |
| 2018 | UCUGGGAGGUCGUCAGUUG |
| 2019 | CUGGGAGGUCGUCAGUUGG |
| 2020 | UGGGAGGUCGUCAGUUGGG |
| 2021 | GGGAGGUCGUCAGUUGGGC |
| 2022 | GGAGGUCGUCAGUUGGGCU |
| 2023 | GAGGUCGUCAGUUGGGCUG |
| 2024 | AGGUCGUCAGUUGGGCUGG |
| 2025 | GGUCGUCAGUUGGGCUGGC |
| 2026 | GUCGUCAGUUGGGCUGGCC |
| 2027 | UCGUCAGUUGGGCUGGCCU |
| 2028 | CGUCAGUUGGGCUGGCCUC |
| 2029 | GUCAGUUGGGCUGGCCUCC |
| 2030 | UCAGUUGGGCUGGCCUCCU |
| 2031 | CAGUUGGGCUGGCCUCCUG |
| 2032 | AGUUGGGCUGGCCUCCUGG |
| 2033 | GUUGGGCUGGCCUCCUGGC |
| 2034 | UUGGGCUGGCCUCCUGGCU |
| 2035 | UGGGCUGGCCUCCUGGCUA |
| 2036 | GGGCUGGCCUCCUGGCUAA |
| 2037 | GGCUGGCCUCCUGGCUAAG |
| 2038 | GCUGGCCUCCUGGCUAAGA |
| 2039 | CUGGCCUCCUGGCUAAGAU |
| 2040 | UGGCCUCCUGGCUAAGAUU |
| 2041 | GGCCUCCUGGCUAAGAUUU |
| 2042 | GCCUCCUGGCUAAGAUUUU |
| 2043 | CCUCCUGGCUAAGAUUUUU |
| 2044 | CUCCUGGCUAAGAUUUUUG |
| 2045 | UCCUGGCUAAGAUUUUUGC |
| 2046 | CCUGGCUAAGAUUUUUGCA |
| 2047 | CUGGCUAAGAUUUUUGCAC |
| 2048 | UGGCUAAGAUUUUUGCACC |
| 2049 | GGCUAAGAUUUUUGCACCA |
| 2050 | GCUAAGAUUUUUGCACCAC |
| 2051 | CUAAGAUUUUUGCACCACA |
| 2052 | UAAGAUUUUUGCACCACAA |
| 2053 | AAGAUUUUUGCACCACAAG |
| 2054 | AGAUUUUUGCACCACAAGA |
| 2055 | GAUUUUUGCACCACAAGAG |
| 2056 | AUUUUUGCACCACAAGAGA |
| 2057 | UUUUUGCACCACAAGAGAU |
| 2058 | UUUUGCACCACAAGAGAUG |
| 2059 | UUUGCACCACAAGAGAUGC |
| 2060 | UUGCACCACAAGAGAUGCU |
| 2061 | UGCACCACAAGAGAUGCUG |
| 2062 | GCACCACAAGAGAUGCUGC |
| 2063 | CACCACAAGAGAUGCUGCA |
| 2064 | ACCACAAGAGAUGCUGCAU |
| 2065 | CCACAAGAGAUGCUGCAUG |
| 2066 | CACAAGAGAUGCUGCAUGU |
| 2067 | ACAAGAGAUGCUGCAUGUG |
| 2068 | CAAGAGAUGCUGCAUGUGU |
| 2069 | AAGAGAUGCUGCAUGUGUA |
| 2070 | AGAGAUGCUGCAUGUGUAC |
| 2071 | GAGAUGCUGCAUGUGUACA |
| 2072 | AGAUGCUGCAUGUGUACAA |
| 2073 | GAUGCUGCAUGUGUACAAA |
| 2074 | AUGCUGCAUGUGUACAAAU |
| 2075 | UGCUGCAUGUGUACAAAUC |
| 2076 | GCUGCAUGUGUACAAAUCA |
| 2077 | CUGCAUGUGUACAAAUCAC |
| 2078 | UGCAUGUGUACAAAUCACU |
| 2079 | GCAUGUGUACAAAUCACUA |
| 2080 | CAUGUGUACAAAUCACUAG |
| 2081 | AUGUGUACAAAUCACUAGC |
| 2082 | UGUGUACAAAUCACUAGCA |
| 2083 | GUGUACAAAUCACUAGCAA |
| 2084 | UGUACAAAUCACUAGCAAA |
| 2085 | GUACAAAUCACUAGCAAAU |
| 2086 | UACAAAUCACUAGCAAAUA |
| 2087 | ACAAAUCACUAGCAAAUAG |
| 2088 | CAAAUCACUAGCAAAUAGA |
| 2089 | AAAUCACUAGCAAAUAGAU |
| 2090 | AAUCACUAGCAAAUAGAUU |
| 2091 | AUCACUAGCAAAUAGAUUU |
| 2092 | UCACUAGCAAAUAGAUUUG |
| 2093 | CACUAGCAAAUAGAUUUGU |
| 2094 | ACUAGCAAAUAGAUUUGUU |
| 2095 | CUAGCAAAUAGAUUUGUUU |
| 2096 | UAGCAAAUAGAUUUGUUUC |
| 2097 | AGCAAAUAGAUUUGUUUCC |
| 2098 | GCAAAUAGAUUUGUUUCCC |
| 2099 | CAAAUAGAUUUGUUUCCCA |
| 2100 | AAAUAGAUUUGUUUCCCAU |
| 2101 | AAUAGAUUUGUUUCCCAUC |
| 2102 | AUAGAUUUGUUUCCCAUCA |
| 2103 | UAGAUUUGUUUCCCAUCAA |
| 2104 | AGAUUUGUUUCCCAUCAAC |
| 2105 | GAUUUGUUUCCCAUCAACU |
| 2106 | AUUUGUUUCCCAUCAACUU |
| 2107 | UUUGUUUCCCAUCAACUUA |
| 2108 | UUGUUUCCCAUCAACUUAG |
| 2109 | UGUUUCCCAUCAACUUAGC |
| 2110 | GUUUCCCAUCAACUUAGCC |
| 2111 | UUUCCCAUCAACUUAGCCA |
| 2112 | UUCCCAUCAACUUAGCCAC |
| 2113 | UCCCAUCAACUUAGCCACU |
| 2114 | CCCAUCAACUUAGCCACUG |
| 2115 | CCAUCAACUUAGCCACUGU |
| 2116 | CAUCAACUUAGCCACUGUU |
| 2117 | AUCAACUUAGCCACUGUUA |
| 2118 | UCAACUUAGCCACUGUUAA |
| 2119 | CAACUUAGCCACUGUUAAU |
| 2120 | AACUUAGCCACUGUUAAUG |
| 2121 | ACUUAGCCACUGUUAAUGU |
| 2122 | CUUAGCCACUGUUAAUGUA |
| 2123 | UUAGCCACUGUUAAUGUAA |
| 2124 | UAGCCACUGUUAAUGUAAA |
| 2125 | AGCCACUGUUAAUGUAAAU |
| 2126 | GCCACUGUUAAUGUAAAUU |
| 2127 | CCACUGUUAAUGUAAAUUG |
| 2128 | CACUGUUAAUGUAAAUUGU |
| 2129 | ACUGUUAAUGUAAAUUGUU |
| 2130 | CUGUUAAUGUAAAUUGUUC |
| 2131 | UGUUAAUGUAAAUUGUUCU |
| 2132 | GUUAAUGUAAAUUGUUCUU |
| 2133 | UUAAUGUAAAUUGUUCUUG |
| 2134 | UAAUGUAAAUUGUUCUUGG |
| 2135 | AAUGUAAAUUGUUCUUGGA |
| 2136 | AUGUAAAUUGUUCUUGGAU |
| 2137 | UGUAAAUUGUUCUUGGAUA |
| 2138 | GUAAAUUGUUCUUGGAUAU |
| 2139 | UAAAUUGUUCUUGGAUAUG |
| 2140 | AAAUUGUUCUUGGAUAUGU |
| 2141 | AAUUGUUCUUGGAUAUGUG |
| 2142 | AUUGUUCUUGGAUAUGUGU |
| 2143 | UUGUUCUUGGAUAUGUGUC |
| 2144 | UGUUCUUGGAUAUGUGUCU |
| 2145 | GUUCUUGGAUAUGUGUCUU |
| 2146 | UUCUUGGAUAUGUGUCUUU |
| 2147 | UCUUGGAUAUGUGUCUUUG |
| 2148 | CUUGGAUAUGUGUCUUUGG |
| 2149 | UUGGAUAUGUGUCUUUGGA |
| 2150 | UGGAUAUGUGUCUUUGGAG |
| 2151 | GGAUAUGUGUCUUUGGAGG |
| 2152 | GAUAUGUGUCUUUGGAGGG |
| 2153 | AUAUGUGUCUUUGGAGGGC |
| 2154 | UAUGUGUCUUUGGAGGGCA |
| 2155 | AUGUGUCUUUGGAGGGCAA |
| 2156 | UGUGUCUUUGGAGGGCAAU |
| 2157 | GUGUCUUUGGAGGGCAAUA |
| 2158 | UGUCUUUGGAGGGCAAUAA |
| 2159 | GUCUUUGGAGGGCAAUAAA |
| 2160 | UCUUUGGAGGGCAAUAAAU |
| 2161 | CUUUGGAGGGCAAUAAAUG |
| 2162 | UUUGGAGGGCAAUAAAUGC |
| 2163 | UUGGAGGGCAAUAAAUGCU |
| 2164 | UGGAGGGCAAUAAAUGCUC |
| 2165 | GGAGGGCAAUAAAUGCUCU |
| 2166 | GAGGGCAAUAAAUGCUCUG |
| 2167 | AGGGCAAUAAAUGCUCUGA |
| 2168 | GGGCAAUAAAUGCUCUGAA |
| 2169 | GGCAAUAAAUGCUCUGAAC |
| 2170 | GCAAUAAAUGCUCUGAACA |
| 2171 | CAAUAAAUGCUCUGAACAG |
| 2172 | AAUAAAUGCUCUGAACAGC |
| 2173 | AUAAAUGCUCUGAACAGCA |
| 2174 | UAAAUGCUCUGAACAGCAC |
| 2175 | AAAUGCUCUGAACAGCACU |
| 2176 | AAUGCUCUGAACAGCACUU |
| 2177 | AUGCUCUGAACAGCACUUG |
| 2178 | UGCUCUGAACAGCACUUGC |
| 2179 | GCUCUGAACAGCACUUGCA |
| 2180 | CUCUGAACAGCACUUGCAC |
| 2181 | UCUGAACAGCACUUGCACA |
| 2182 | CUGAACAGCACUUGCACAA |
| 2183 | UGAACAGCACUUGCACAAU |
| 2184 | GAACAGCACUUGCACAAUA |
| 2185 | CACUUGCACAAUAAAGAUA |
| 2186 | ACUUGCACAAUAAAGAUAC |
| 2187 | CUUGCACAAUAAAGAUACA |
| 2188 | UUGCACAAUAAAGAUACAG |
| 2189 | UGCACAAUAAAGAUACAGC |
| 2190 | GCACAAUAAAGAUACAGCA |
| 2191 | CACAAUAAAGAUACAGCAU |
| 2192 | ACAAUAAAGAUACAGCAUG |
| 2193 | CAAUAAAGAUACAGCAUGU |
| 2194 | AAUAAAGAUACAGCAUGUG |
| 2195 | AUAAAGAUACAGCAUGUGG |
| 2196 | UAAAGAUACAGCAUGUGGA |
| 2197 | AAAGAUACAGCAUGUGGAA |
| 2198 | AAGAUACAGCAUGUGGAAA |
| 2199 | AGAUACAGCAUGUGGAAAA |
| 2200 | GAUACAGCAUGUGGAAAAA |
| 2201 | AUACAGCAUGUGGAAAAAA |
| 2202 | UACAGCAUGUGGAAAAAAA |
| 2203 | ACAGCAUGUGGAAAAAAAA |
| 2204 | CAGCAUGUGGAAAAAAAAA |
| 2205 | AGCAUGUGGAAAAAAAAAA |
| 2206 | GCAUGUGGAAAAAAAAAAA |
| 2207 | CAUGUGGAAAAAAAAAAAA |
| 2208 | AUGUGGAAAAAAAAAAAAA |
| 2209 | UGUGGAAAAAAAAAAAAAA |

TABLE 3
DsRNA molecules targeting mRNA encoding chicken
r-spondin.

| SEQ ID NO | Sequence 5′-3′ |
|---|---|
| 2210 | AUGGAUCUAACAGGCGGCA |
| 2211 | UGGAUCUAACAGGCGGCAG |
| 2212 | GGAUCUAACAGGCGGCAGC |
| 2213 | GAUCUAACAGGCGGCAGCA |
| 2214 | AUCUAACAGGCGGCAGCAA |
| 2215 | UCUAACAGGCGGCAGCAAA |
| 2216 | CUAACAGGCGGCAGCAAAG |
| 2217 | UAACAGGCGGCAGCAAAGU |
| 2218 | AACAGGCGGCAGCAAAGUG |
| 2219 | ACAGGCGGCAGCAAAGUGG |
| 2220 | CAGGCGGCAGCAAAGUGGU |
| 2221 | AGGCGGCAGCAAAGUGGUG |
| 2222 | GGCGGCAGCAAAGUGGUGA |
| 2223 | GCGGCAGCAAAGUGGUGAA |
| 2224 | CGGCAGCAAAGUGGUGAAG |
| 2225 | GGCAGCAAAGUGGUGAAGG |
| 2226 | GCAGCAAAGUGGUGAAGGG |
| 2227 | CAGCAAAGUGGUGAAGGGC |
| 2228 | AGCAAAGUGGUGAAGGGCA |
| 2229 | GCAAAGUGGUGAAGGGCAA |
| 2230 | CAAAGUGGUGAAGGGCAAG |
| 2231 | AAAGUGGUGAAGGGCAAGA |
| 2232 | AAGUGGUGAAGGGCAAGAG |
| 2233 | AGUGGUGAAGGGCAAGAGG |
| 2234 | GUGGUGAAGGGCAAGAGGC |
| 2235 | UGGUGAAGGGCAAGAGGCA |
| 2236 | GGUGAAGGGCAAGAGGCAA |
| 2237 | GUGAAGGGCAAGAGGCAAA |
| 2238 | UGAAGGGCAAGAGGCAAAG |
| 2239 | GAAGGGCAAGAGGCAAAGG |
| 2240 | AAGGGCAAGAGGCAAAGGC |
| 2241 | AGGGCAAGAGGCAAAGGCG |
| 2242 | GGGCAAGAGGCAAAGGCGA |
| 2243 | GGCAAGAGGCAAAGGCGAA |
| 2244 | GCAAGAGGCAAAGGCGAAU |
| 2245 | CAAGAGGCAAAGGCGAAUU |
| 2246 | AAGAGGCAAAGGCGAAUUA |
| 2247 | AGAGGCAAAGGCGAAUUAG |
| 2248 | GAGGCAAAGGCGAAUUAGC |
| 2249 | AGGCAAAGGCGAAUUAGCA |
| 2250 | GGCAAAGGCGAAUUAGCAC |
| 2251 | GCAAAGGCGAAUUAGCACU |
| 2252 | CAAAGGCGAAUUAGCACUG |
| 2253 | AAAGGCGAAUUAGCACUGA |
| 2254 | AAGGCGAAUUAGCACUGAG |
| 2255 | AGGCGAAUUAGCACUGAGC |
| 2256 | GGCGAAUUAGCACUGAGCU |
| 2257 | GCGAAUUAGCACUGAGCUG |
| 2258 | CGAAUUAGCACUGAGCUGA |
| 2259 | GAAUUAGCACUGAGCUGAG |
| 2260 | AAUUAGCACUGAGCUGAGC |
| 2261 | AUUAGCACUGAGCUGAGCC |
| 2262 | UUAGCACUGAGCUGAGCCA |
| 2263 | UAGCACUGAGCUGAGCCAG |
| 2264 | AGCACUGAGCUGAGCCAGG |
| 2265 | GCACUGAGCUGAGCCAGGG |
| 2266 | CACUGAGCUGAGCCAGGGC |
| 2267 | ACUGAGCUGAGCCAGGGCU |
| 2268 | CUGAGCUGAGCCAGGGCUG |
| 2269 | UGAGCUGAGCCAGGGCUGU |
| 2270 | GAGCUGAGCCAGGGCUGUG |
| 2271 | AGCUGAGCCAGGGCUGUGC |
| 2272 | GCUGAGCCAGGGCUGUGCC |
| 2273 | CUGAGCCAGGGCUGUGCCA |
| 2274 | UGAGCCAGGGCUGUGCCAG |
| 2275 | GAGCCAGGGCUGUGCCAGG |
| 2276 | AGCCAGGGCUGUGCCAGGG |
| 2277 | GCCAGGGCUGUGCCAGGGG |
| 2278 | CCAGGGCUGUGCCAGGGGC |
| 2279 | CAGGGCUGUGCCAGGGGCU |
| 2280 | AGGGCUGUGCCAGGGGCUG |
| 2281 | GGGCUGUGCCAGGGGCUGC |
| 2282 | GGCUGUGCCAGGGGCUGCG |
| 2283 | GCUGUGCCAGGGGCUGCGA |
| 2284 | CUGUGCCAGGGGCUGCGAC |
| 2285 | UGUGCCAGGGGCUGCGACC |
| 2286 | GUGCCAGGGGCUGCGACCU |
| 2287 | UGCCAGGGGCUGCGACCUG |
| 2288 | GCCAGGGGCUGCGACCUGU |
| 2289 | CCAGGGGCUGCGACCUGUG |
| 2290 | CAGGGGCUGCGACCUGUGC |
| 2291 | AGGGGCUGCGACCUGUGCU |
| 2292 | GGGGCUGCGACCUGUGCUC |
| 2293 | GGGCUGCGACCUGUGCUCU |
| 2294 | GGCUGCGACCUGUGCUCUG |
| 2295 | GCUGCGACCUGUGCUCUGA |
| 2296 | CUGCGACCUGUGCUCUGAG |
| 2297 | UGCGACCUGUGCUCUGAGU |
| 2298 | GCGACCUGUGCUCUGAGUU |
| 2299 | CGACCUGUGCUCUGAGUUC |
| 2300 | GACCUGUGCUCUGAGUUCA |
| 2301 | ACCUGUGCUCUGAGUUCAA |
| 2302 | CCUGUGCUCUGAGUUCAAC |
| 2303 | CUGUGCUCUGAGUUCAACG |
| 2304 | UGUGCUCUGAGUUCAACGG |
| 2305 | GUGCUCUGAGUUCAACGGG |
| 2306 | UGCUCUGAGUUCAACGGGU |
| 2307 | GCUCUGAGUUCAACGGGUG |
| 2308 | CUCUGAGUUCAACGGGUGC |
| 2309 | UCUGAGUUCAACGGGUGCC |
| 2310 | CUGAGUUCAACGGGUGCCU |
| 2311 | UGAGUUCAACGGGUGCCUG |
| 2312 | GAGUUCAACGGGUGCCUGA |
| 2313 | AGUUCAACGGGUGCCUGAG |
| 2314 | GUUCAACGGGUGCCUGAGA |
| 2315 | UUCAACGGGUGCCUGAGAU |
| 2316 | UCAACGGGUGCCUGAGAUG |
| 2317 | CAACGGGUGCCUGAGAUGU |
| 2318 | AACGGGUGCCUGAGAUGUU |
| 2319 | ACGGGUGCCUGAGAUGUUC |
| 2320 | CGGGUGCCUGAGAUGUUCC |
| 2321 | GGGUGCCUGAGAUGUUCCC |
| 2322 | GGUGCCUGAGAUGUUCCCC |
| 2323 | GUGCCUGAGAUGUUCCCCC |
| 2324 | UGCCUGAGAUGUUCCCCCA |
| 2325 | GCCUGAGAUGUUCCCCCAA |
| 2326 | CCUGAGAUGUUCCCCCAAG |
| 2327 | CUGAGAUGUUCCCCCAAGC |
| 2328 | UGAGAUGUUCCCCCAAGCU |
| 2329 | GAGAUGUUCCCCCAAGCUC |
| 2330 | AGAUGUUCCCCCAAGCUCU |
| 2331 | GAUGUUCCCCCAAGCUCUU |
| 2332 | AUGUUCCCCCAAGCUCUUC |
| 2333 | UGUUCCCCCAAGCUCUUCA |
| 2334 | GUUCCCCCAAGCUCUUCAU |
| 2335 | UUCCCCCAAGCUCUUCAUC |
| 2336 | UCCCCCAAGCUCUUCAUCC |
| 2337 | CCCCCAAGCUCUUCAUCCU |
| 2338 | CCCCAAGCUCUUCAUCCUU |
| 2339 | CCCAAGCUCUUCAUCCUUC |
| 2340 | CCAAGCUCUUCAUCCUUCU |
| 2341 | CAAGCUCUUCAUCCUUCUG |
| 2342 | AAGCUCUUCAUCCUUCUGG |
| 2343 | AGCUCUUCAUCCUUCUGGA |
| 2344 | GCUCUUCAUCCUUCUGGAG |
| 2345 | CUCUUCAUCCUUCUGGAGA |
| 2346 | UCUUCAUCCUUCUGGAGAG |
| 2347 | CUUCAUCCUUCUGGAGAGG |
| 2348 | UUCAUCCUUCUGGAGAGGA |
| 2349 | UCAUCCUUCUGGAGAGGAA |
| 2350 | CAUCCUUCUGGAGAGGAAC |
| 2351 | AUCCUUCUGGAGAGGAACG |
| 2352 | UCCUUCUGGAGAGGAACGA |
| 2353 | CCUUCUGGAGAGGAACGAU |
| 2354 | CUUCUGGAGAGGAACGAUA |
| 2355 | UUCUGGAGAGGAACGAUAU |
| 2356 | UCUGGAGAGGAACGAUAUC |
| 2357 | CUGGAGAGGAACGAUAUCC |
| 2358 | UGGAGAGGAACGAUAUCCG |
| 2359 | GGAGAGGAACGAUAUCCGG |
| 2360 | GAGAGGAACGAUAUCCGGC |
| 2361 | AGAGGAACGAUAUCCGGCA |
| 2362 | GAGGAACGAUAUCCGGCAA |
| 2363 | AGGAACGAUAUCCGGCAAA |
| 2364 | GGAACGAUAUCCGGCAAAU |
| 2365 | GAACGAUAUCCGGCAAAUU |
| 2366 | AACGAUAUCCGGCAAAUUG |
| 2367 | ACGAUAUCCGGCAAAUUGG |
| 2368 | CGAUAUCCGGCAAAUUGGG |
| 2369 | GAUAUCCGGCAAAUUGGGA |
| 2370 | AUAUCCGGCAAAUUGGGAU |
| 2371 | UAUCCGGCAAAUUGGGAUC |
| 2372 | AUCCGGCAAAUUGGGAUCU |
| 2373 | UCCGGCAAAUUGGGAUCUG |
| 2374 | CCGGCAAAUUGGGAUCUGC |
| 2375 | CGGCAAAUUGGGAUCUGCC |
| 2376 | GGCAAAUUGGGAUCUGCCU |
| 2377 | GCAAAUUGGGAUCUGCCUC |
| 2378 | CAAAUUGGGAUCUGCCUCC |
| 2379 | AAAUUGGGAUCUGCCUCCC |
| 2380 | AAUUGGGAUCUGCCUCCCA |
| 2381 | AUUGGGAUCUGCCUCCCAU |
| 2382 | UUGGGAUCUGCCUCCCAUC |
| 2383 | UGGGAUCUGCCUCCCAUCC |
| 2384 | GGGAUCUGCCUCCCAUCCU |
| 2385 | GGAUCUGCCUCCCAUCCUG |
| 2386 | GAUCUGCCUCCCAUCCUGU |
| 2387 | AUCUGCCUCCCAUCCUGUC |
| 2388 | UCUGCCUCCCAUCCUGUCC |
| 2389 | CUGCCUCCCAUCCUGUCCA |
| 2390 | UGCCUCCCAUCCUGUCCAC |
| 2391 | GCCUCCCAUCCUGUCCACU |
| 2392 | CCUCCCAUCCUGUCCACUG |
| 2393 | CUCCCAUCCUGUCCACUGG |
| 2394 | UCCCAUCCUGUCCACUGGG |
| 2395 | CCCAUCCUGUCCACUGGGA |
| 2396 | CCAUCCUGUCCACUGGGAU |
| 2397 | CAUCCUGUCCACUGGGAUA |
| 2398 | AUCCUGUCCACUGGGAUAC |
| 2399 | UCCUGUCCACUGGGAUACU |
| 2400 | CCUGUCCACUGGGAUACUU |
| 2401 | CUGUCCACUGGGAUACUUU |
| 2402 | UGUCCACUGGGAUACUUUG |
| 2403 | GUCCACUGGGAUACUUUGG |
| 2404 | UCCACUGGGAUACUUUGGC |
| 2405 | CCACUGGGAUACUUUGGCC |
| 2406 | CACUGGGAUACUUUGGCCU |
| 2407 | ACUGGGAUACUUUGGCCUU |
| 2408 | CUGGGAUACUUUGGCCUUC |
| 2409 | UGGGAUACUUUGGCCUUCG |
| 2410 | GGGAUACUUUGGCCUUCGC |
| 2411 | GGAUACUUUGGCCUUCGCA |
| 2412 | GAUACUUUGGCCUUCGCAA |
| 2413 | AUACUUUGGCCUUCGCAAU |
| 2414 | UACUUUGGCCUUCGCAAUA |
| 2415 | ACUUUGGCCUUCGCAAUAC |
| 2416 | CUUUGGCCUUCGCAAUACA |
| 2417 | UUUGGCCUUCGCAAUACAG |
| 2418 | UUGGCCUUCGCAAUACAGA |
| 2419 | UGGCCUUCGCAAUACAGAC |
| 2420 | GGCCUUCGCAAUACAGACA |
| 2421 | GCCUUCGCAAUACAGACAU |
| 2422 | CCUUCGCAAUACAGACAUG |
| 2423 | CUUCGCAAUACAGACAUGA |
| 2424 | UUCGCAAUACAGACAUGAA |
| 2425 | UCGCAAUACAGACAUGAAC |
| 2426 | CGCAAUACAGACAUGAACA |
| 2427 | GCAAUACAGACAUGAACAA |
| 2428 | CAAUACAGACAUGAACAAG |
| 2429 | AAUACAGACAUGAACAAGU |
| 2430 | AUACAGACAUGAACAAGUG |
| 2431 | UACAGACAUGAACAAGUGC |
| 2432 | ACAGACAUGAACAAGUGCA |
| 2433 | CAGACAUGAACAAGUGCAU |
| 2434 | AGACAUGAACAAGUGCAUC |
| 2435 | GACAUGAACAAGUGCAUCA |
| 2436 | ACAUGAACAAGUGCAUCAA |
| 2437 | CAUGAACAAGUGCAUCAAA |
| 2438 | AUGAACAAGUGCAUCAAAU |
| 2439 | UGAACAAGUGCAUCAAAUG |
| 2440 | GAACAAGUGCAUCAAAUGC |
| 2441 | AACAAGUGCAUCAAAUGCA |
| 2442 | ACAAGUGCAUCAAAUGCAA |
| 2443 | CAAGUGCAUCAAAUGCAAA |
| 2444 | AAGUGCAUCAAAUGCAAAA |
| 2445 | AGUGCAUCAAAUGCAAAAU |
| 2446 | GUGCAUCAAAUGCAAAAUC |
| 2447 | UGCAUCAAAUGCAAAAUCG |
| 2448 | GCAUCAAAUGCAAAAUCGA |
| 2449 | CAUCAAAUGCAAAAUCGAG |
| 2450 | AUCAAAUGCAAAAUCGAGA |
| 2451 | UCAAAUGCAAAAUCGAGAA |
| 2452 | CAAAUGCAAAAUCGAGAAC |
| 2453 | AAAUGCAAAAUCGAGAACU |
| 2454 | AAUGCAAAAUCGAGAACUG |
| 2455 | AUGCAAAAUCGAGAACUGU |
| 2456 | UGCAAAAUCGAGAACUGUG |
| 2457 | GCAAAAUCGAGAACUGUGA |
| 2458 | CAAAAUCGAGAACUGUGAG |
| 2459 | AAAAUCGAGAACUGUGAGU |
| 2460 | AAAUCGAGAACUGUGAGUC |
| 2461 | AAUCGAGAACUGUGAGUCC |
| 2462 | AUCGAGAACUGUGAGUCCU |
| 2463 | UCGAGAACUGUGAGUCCUG |
| 2464 | CGAGAACUGUGAGUCCUGC |
| 2465 | GAGAACUGUGAGUCCUGCU |
| 2466 | AGAACUGUGAGUCCUGCUU |
| 2467 | GAACUGUGAGUCCUGCUUC |
| 2468 | AACUGUGAGUCCUGCUUCA |
| 2469 | ACUGUGAGUCCUGCUUCAG |
| 2470 | CUGUGAGUCCUGCUUCAGC |
| 2471 | UGUGAGUCCUGCUUCAGCC |
| 2472 | GUGAGUCCUGCUUCAGCCG |
| 2473 | UGAGUCCUGCUUCAGCCGA |
| 2474 | GAGUCCUGCUUCAGCCGAA |
| 2475 | AGUCCUGCUUCAGCCGAAA |
| 2476 | GUCCUGCUUCAGCCGAAAC |
| 2477 | UCCUGCUUCAGCCGAAACU |
| 2478 | CCUGCUUCAGCCGAAACUU |
| 2479 | CUGCUUCAGCCGAAACUUU |
| 2480 | UGCUUCAGCCGAAACUUUU |
| 2481 | GCUUCAGCCGAAACUUUUG |
| 2482 | CUUCAGCCGAAACUUUUGC |
| 2483 | UUCAGCCGAAACUUUUGCA |
| 2484 | UCAGCCGAAACUUUUGCAC |
| 2485 | CAGCCGAAACUUUUGCACA |
| 2486 | AGCCGAAACUUUUGCACAA |
| 2487 | GCCGAAACUUUUGCACAAA |
| 2488 | CCGAAACUUUUGCACAAAA |
| 2489 | CGAAACUUUUGCACAAAAU |
| 2490 | GAAACUUUUGCACAAAAUG |
| 2491 | AAACUUUUGCACAAAAUGU |
| 2492 | AACUUUUGCACAAAAUGUA |
| 2493 | ACUUUUGCACAAAAUGUAA |
| 2494 | CUUUUGCACAAAAUGUAAG |
| 2495 | UUUUGCACAAAAUGUAAGG |
| 2496 | UUUGCACAAAAUGUAAGGA |
| 2497 | UUGCACAAAAUGUAAGGAA |
| 2498 | UGCACAAAAUGUAAGGAAG |
| 2499 | GCACAAAAUGUAAGGAAGG |
| 2500 | CACAAAAUGUAAGGAAGGU |
| 2501 | ACAAAAUGUAAGGAAGGUU |
| 2502 | CAAAAUGUAAGGAAGGUUU |
| 2503 | AAAAUGUAAGGAAGGUUUG |
| 2504 | AAAUGUAAGGAAGGUUUGU |
| 2505 | AAUGUAAGGAAGGUUUGUA |
| 2506 | AUGUAAGGAAGGUUUGUAU |
| 2507 | UGUAAGGAAGGUUUGUAUU |
| 2508 | GUAAGGAAGGUUUGUAUUU |
| 2509 | UAAGGAAGGUUUGUAUUUG |
| 2510 | AAGGAAGGUUUGUAUUUGC |
| 2511 | AGGAAGGUUUGUAUUUGCA |
| 2512 | GGAAGGUUUGUAUUUGCAC |
| 2513 | GAAGGUUUGUAUUUGCACA |
| 2514 | AAGGUUUGUAUUUGCACAA |
| 2515 | AGGUUUGUAUUUGCACAAA |
| 2516 | GGUUUGUAUUUGCACAAAG |
| 2517 | GUUUGUAUUUGCACAAAGG |
| 2518 | UUUGUAUUUGCACAAAGGG |
| 2519 | UUGUAUUUGCACAAAGGGA |
| 2520 | UGUAUUUGCACAAAGGGAG |
| 2521 | GUAUUUGCACAAAGGGAGA |
| 2522 | UAUUUGCACAAAGGGAGAU |
| 2523 | AUUUGCACAAAGGGAGAUG |
| 2524 | UUUGCACAAAGGGAGAUGU |
| 2525 | UUGCACAAAGGGAGAUGUU |
| 2526 | UGCACAAAGGGAGAUGUUA |
| 2527 | GCACAAAGGGAGAUGUUAC |
| 2528 | CACAAAGGGAGAUGUUACG |
| 2529 | ACAAAGGGAGAUGUUACGU |
| 2530 | CAAAGGGAGAUGUUACGUC |
| 2531 | AAAGGGAGAUGUUACGUCA |
| 2532 | AAGGGAGAUGUUACGUCAC |
| 2533 | AGGGAGAUGUUACGUCACG |
| 2534 | GGGAGAUGUUACGUCACGU |
| 2535 | GGAGAUGUUACGUCACGUG |
| 2536 | GAGAUGUUACGUCACGUGC |
| 2537 | AGAUGUUACGUCACGUGCC |
| 2538 | GAUGUUACGUCACGUGCCC |
| 2539 | AUGUUACGUCACGUGCCCC |
| 2540 | UGUUACGUCACGUGCCCCG |
| 2541 | GUUACGUCACGUGCCCCGA |
| 2542 | UUACGUCACGUGCCCCGAA |
| 2543 | UACGUCACGUGCCCCGAAG |
| 2544 | ACGUCACGUGCCCCGAAGG |
| 2545 | CGUCACGUGCCCCGAAGGC |
| 2546 | GUCACGUGCCCCGAAGGCU |
| 2547 | UCACGUGCCCCGAAGGCUA |
| 2548 | CACGUGCCCCGAAGGCUAC |
| 2549 | ACGUGCCCCGAAGGCUACU |
| 2550 | CGUGCCCCGAAGGCUACUC |
| 2551 | GUGCCCCGAAGGCUACUCU |
| 2552 | UGCCCCGAAGGCUACUCUG |
| 2553 | GCCCCGAAGGCUACUCUGC |
| 2554 | CCCCGAAGGCUACUCUGCU |
| 2555 | CCCGAAGGCUACUCUGCUG |
| 2556 | CCGAAGGCUACUCUGCUGC |
| 2557 | CGAAGGCUACUCUGCUGCC |
| 2558 | GAAGGCUACUCUGCUGCCA |
| 2559 | AAGGCUACUCUGCUGCCAA |
| 2560 | AGGCUACUCUGCUGCCAAU |
| 2561 | GGCUACUCUGCUGCCAAUG |
| 2562 | GCUACUCUGCUGCCAAUGG |
| 2563 | CUACUCUGCUGCCAAUGGC |
| 2564 | UACUCUGCUGCCAAUGGCA |
| 2565 | ACUCUGCUGCCAAUGGCAC |
| 2566 | CUCUGCUGCCAAUGGCACC |
| 2567 | UCUGCUGCCAAUGGCACCA |
| 2568 | CUGCUGCCAAUGGCACCAU |
| 2569 | UGCUGCCAAUGGCACCAUG |
| 2570 | GCUGCCAAUGGCACCAUGG |
| 2571 | CUGCCAAUGGCACCAUGGA |
| 2572 | UGCCAAUGGCACCAUGGAG |
| 2573 | GCCAAUGGCACCAUGGAGU |
| 2574 | CCAAUGGCACCAUGGAGUG |
| 2575 | CAAUGGCACCAUGGAGUGC |
| 2576 | AAUGGCACCAUGGAGUGCA |
| 2577 | AUGGCACCAUGGAGUGCAG |
| 2578 | UGGCACCAUGGAGUGCAGC |
| 2579 | GGCACCAUGGAGUGCAGCA |
| 2580 | GCACCAUGGAGUGCAGCAG |
| 2581 | CACCAUGGAGUGCAGCAGU |
| 2582 | ACCAUGGAGUGCAGCAGUC |
| 2583 | CCAUGGAGUGCAGCAGUCC |
| 2584 | CAUGGAGUGCAGCAGUCCU |
| 2585 | AUGGAGUGCAGCAGUCCUG |
| 2586 | UGGAGUGCAGCAGUCCUGC |
| 2587 | GGAGUGCAGCAGUCCUGCG |
| 2588 | GAGUGCAGCAGUCCUGCGC |
| 2589 | AGUGCAGCAGUCCUGCGCA |
| 2590 | GUGCAGCAGUCCUGCGCAA |
| 2591 | UGCAGCAGUCCUGCGCAAU |
| 2592 | GCAGCAGUCCUGCGCAAUG |
| 2593 | CAGCAGUCCUGCGCAAUGU |
| 2594 | AGCAGUCCUGCGCAAUGUG |
| 2595 | GCAGUCCUGCGCAAUGUGA |
| 2596 | CAGUCCUGCGCAAUGUGAA |
| 2597 | AGUCCUGCGCAAUGUGAAA |
| 2598 | GUCCUGCGCAAUGUGAAAU |
| 2599 | UCCUGCGCAAUGUGAAAUG |
| 2600 | CCUGCGCAAUGUGAAAUGA |
| 2601 | CUGCGCAAUGUGAAAUGAG |
| 2602 | UGCGCAAUGUGAAAUGAGU |
| 2603 | GCGCAAUGUGAAAUGAGUG |
| 2604 | CGCAAUGUGAAAUGAGUGA |
| 2605 | GCAAUGUGAAAUGAGUGAG |
| 2606 | CAAUGUGAAAUGAGUGAGU |
| 2607 | AAUGUGAAAUGAGUGAGUG |
| 2608 | AUGUGAAAUGAGUGAGUGG |
| 2609 | UGUGAAAUGAGUGAGUGGG |
| 2610 | GUGAAAUGAGUGAGUGGGG |
| 2611 | UGAAAUGAGUGAGUGGGGG |
| 2612 | GAAAUGAGUGAGUGGGGGC |
| 2613 | AAAUGAGUGAGUGGGGGCC |
| 2614 | AAUGAGUGAGUGGGGGCCC |
| 2615 | AUGAGUGAGUGGGGGCCCU |
| 2616 | UGAGUGAGUGGGGGCCCUG |
| 2617 | GAGUGAGUGGGGGCCCUGG |
| 2618 | AGUGAGUGGGGGCCCUGGG |
| 2619 | GUGAGUGGGGGCCCUGGGG |
| 2620 | UGAGUGGGGGCCCUGGGGG |
| 2621 | GAGUGGGGGCCCUGGGGGC |
| 2622 | AGUGGGGGCCCUGGGGGCC |
| 2623 | GUGGGGGCCCUGGGGGCCC |
| 2624 | UGGGGGCCCUGGGGGCCCU |
| 2625 | GGGGGCCCUGGGGGCCCUG |
| 2626 | GGGGCCCUGGGGGCCCUGC |
| 2627 | GGGCCCUGGGGGCCCUGCU |
| 2628 | GGCCCUGGGGGCCCUGCUC |
| 2629 | GCCCUGGGGGCCCUGCUCC |
| 2630 | CCCUGGGGGCCCUGCUCCA |
| 2631 | CCUGGGGGCCCUGCUCCAA |
| 2632 | CUGGGGGCCCUGCUCCAAG |
| 2633 | UGGGGGCCCUGCUCCAAGA |
| 2634 | GGGGGCCCUGCUCCAAGAA |
| 2635 | GGGGCCCUGCUCCAAGAAG |
| 2636 | GGGCCCUGCUCCAAGAAGA |
| 2637 | GGCCCUGCUCCAAGAAGAG |
| 2638 | GCCCUGCUCCAAGAAGAGG |
| 2639 | CCCUGCUCCAAGAAGAGGA |
| 2640 | CCUGCUCCAAGAAGAGGAA |
| 2641 | CUGCUCCAAGAAGAGGAAG |
| 2642 | UGCUCCAAGAAGAGGAAGC |
| 2643 | GCUCCAAGAAGAGGAAGCU |
| 2644 | CUCCAAGAAGAGGAAGCUG |
| 2645 | UCCAAGAAGAGGAAGCUGU |
| 2646 | CCAAGAAGAGGAAGCUGUG |
| 2647 | CAAGAAGAGGAAGCUGUGU |
| 2648 | AAGAAGAGGAAGCUGUGUG |
| 2649 | AGAAGAGGAAGCUGUGUGG |
| 2650 | GAAGAGGAAGCUGUGUGGC |
| 2651 | AAGAGGAAGCUGUGUGGCU |
| 2652 | AGAGGAAGCUGUGUGGCUU |
| 2653 | GAGGAAGCUGUGUGGCUUC |
| 2654 | AGGAAGCUGUGUGGCUUCA |
| 2655 | GGAAGCUGUGUGGCUUCAA |
| 2656 | GAAGCUGUGUGGCUUCAAG |
| 2657 | AAGCUGUGUGGCUUCAAGA |
| 2658 | AGCUGUGUGGCUUCAAGAA |
| 2659 | GCUGUGUGGCUUCAAGAAG |
| 2660 | CUGUGUGGCUUCAAGAAGG |
| 2661 | UGUGUGGCUUCAAGAAGGG |
| 2662 | GUGUGGCUUCAAGAAGGGG |
| 2663 | UGUGGCUUCAAGAAGGGGA |
| 2664 | GUGGCUUCAAGAAGGGGAA |
| 2665 | UGGCUUCAAGAAGGGGAAC |
| 2666 | GGCUUCAAGAAGGGGAACG |
| 2667 | GCUUCAAGAAGGGGAACGA |
| 2668 | CUUCAAGAAGGGGAACGAG |
| 2669 | UUCAAGAAGGGGAACGAGG |
| 2670 | UCAAGAAGGGGAACGAGGA |
| 2671 | CAAGAAGGGGAACGAGGAC |
| 2672 | AAGAAGGGGAACGAGGACC |
| 2673 | AGAAGGGGAACGAGGACCG |
| 2674 | GAAGGGGAACGAGGACCGA |
| 2675 | AAGGGGAACGAGGACCGAA |
| 2676 | AGGGGAACGAGGACCGAAC |
| 2677 | GGGGAACGAGGACCGAACG |
| 2678 | GGGAACGAGGACCGAACGC |
| 2679 | GGAACGAGGACCGAACGCG |
| 2680 | GAACGAGGACCGAACGCGG |
| 2681 | AACGAGGACCGAACGCGGC |
| 2682 | ACGAGGACCGAACGCGGCG |
| 2683 | CGAGGACCGAACGCGGCGG |
| 2684 | GAGGACCGAACGCGGCGGA |
| 2685 | AGGACCGAACGCGGCGGAU |
| 2686 | GGACCGAACGCGGCGGAUC |
| 2687 | GACCGAACGCGGCGGAUCC |
| 2688 | ACCGAACGCGGCGGAUCCU |
| 2689 | CCGAACGCGGCGGAUCCUG |
| 2690 | CGAACGCGGCGGAUCCUGC |
| 2691 | GAACGCGGCGGAUCCUGCA |
| 2692 | AACGCGGCGGAUCCUGCAG |
| 2693 | ACGCGGCGGAUCCUGCAGG |
| 2694 | CGCGGCGGAUCCUGCAGGC |
| 2695 | GCGGCGGAUCCUGCAGGCU |
| 2696 | CGGCGGAUCCUGCAGGCUC |
| 2697 | GGCGGAUCCUGCAGGCUCC |
| 2698 | GCGGAUCCUGCAGGCUCCC |
| 2699 | CGGAUCCUGCAGGCUCCCU |
| 2700 | GGAUCCUGCAGGCUCCCUC |
| 2701 | GAUCCUGCAGGCUCCCUCU |
| 2702 | AUCCUGCAGGCUCCCUCUG |
| 2703 | UCCUGCAGGCUCCCUCUGG |
| 2704 | CCUGCAGGCUCCCUCUGGG |
| 2705 | CUGCAGGCUCCCUCUGGGG |
| 2706 | UGCAGGCUCCCUCUGGGGA |
| 2707 | GCAGGCUCCCUCUGGGGAC |
| 2708 | CAGGCUCCCUCUGGGGACG |
| 2709 | AGGCUCCCUCUGGGGACGU |
| 2710 | GGCUCCCUCUGGGGACGUG |
| 2711 | GCUCCCUCUGGGGACGUGU |
| 2712 | CUCCCUCUGGGGACGUGUC |
| 2713 | UCCCUCUGGGGACGUGUCC |
| 2714 | CCCUCUGGGGACGUGUCCC |
| 2715 | CCUCUGGGGACGUGUCCCU |
| 2716 | CUCUGGGGACGUGUCCCUG |
| 2717 | UCUGGGGACGUGUCCCUGU |
| 2718 | CUGGGGACGUGUCCCUGUG |
| 2719 | UGGGGACGUGUCCCUGUGC |
| 2720 | GGGGACGUGUCCCUGUGCC |
| 2721 | GGGACGUGUCCCUGUGCCC |
| 2722 | GGACGUGUCCCUGUGCCCC |
| 2723 | GACGUGUCCCUGUGCCCCG |
| 2724 | ACGUGUCCCUGUGCCCCGC |
| 2725 | CGUGUCCCUGUGCCCCGCC |
| 2726 | GUGUCCCUGUGCCCCGCCA |
| 2727 | UGUCCCUGUGCCCCGCCAC |
| 2728 | GUCCCUGUGCCCCGCCACC |
| 2729 | UCCCUGUGCCCCGCCACCA |
| 2730 | CCCUGUGCCCCGCCACCAC |
| 2731 | CCUGUGCCCCGCCACCACG |
| 2732 | CUGUGCCCCGCCACCACGG |
| 2733 | UGUGCCCCGCCACCACGGA |
| 2734 | GUGCCCCGCCACCACGGAG |
| 2735 | UGCCCCGCCACCACGGAGG |
| 2736 | GCCCCGCCACCACGGAGGU |
| 2737 | CCCCGCCACCACGGAGGUG |
| 2738 | CCCGCCACCACGGAGGUGC |
| 2739 | CCGCCACCACGGAGGUGCG |
| 2740 | CGCCACCACGGAGGUGCGC |
| 2741 | GCCACCACGGAGGUGCGCA |
| 2742 | CCACCACGGAGGUGCGCAG |
| 2743 | CACCACGGAGGUGCGCAGA |
| 2744 | ACCACGGAGGUGCGCAGAU |
| 2745 | CCACGGAGGUGCGCAGAUG |
| 2746 | CACGGAGGUGCGCAGAUGC |
| 2747 | ACGGAGGUGCGCAGAUGCA |
| 2748 | CGGAGGUGCGCAGAUGCAC |
| 2749 | GGAGGUGCGCAGAUGCACU |
| 2750 | GAGGUGCGCAGAUGCACUG |
| 2751 | AGGUGCGCAGAUGCACUGU |
| 2752 | GGUGCGCAGAUGCACUGUG |
| 2753 | GUGCGCAGAUGCACUGUGC |
| 2754 | UGCGCAGAUGCACUGUGCA |
| 2755 | GCGCAGAUGCACUGUGCAG |
| 2756 | CGCAGAUGCACUGUGCAGA |
| 2757 | GCAGAUGCACUGUGCAGAA |
| 2758 | CAGAUGCACUGUGCAGAAG |
| 2759 | AGAUGCACUGUGCAGAAGA |
| 2760 | GAUGCACUGUGCAGAAGAG |
| 2761 | AUGCACUGUGCAGAAGAGC |
| 2762 | UGCACUGUGCAGAAGAGCC |
| 2763 | GCACUGUGCAGAAGAGCCA |
| 2764 | CACUGUGCAGAAGAGCCAA |
| 2765 | ACUGUGCAGAAGAGCCAAU |
| 2766 | CUGUGCAGAAGAGCCAAUG |
| 2767 | UGUGCAGAAGAGCCAAUGC |
| 2768 | GUGCAGAAGAGCCAAUGCC |
| 2769 | UGCAGAAGAGCCAAUGCCC |
| 2770 | GCAGAAGAGCCAAUGCCCC |
| 2771 | CAGAAGAGCCAAUGCCCCG |
| 2772 | AGAAGAGCCAAUGCCCCGA |
| 2773 | GAAGAGCCAAUGCCCCGAA |
| 2774 | AAGAGCCAAUGCCCCGAAG |
| 2775 | AGAGCCAAUGCCCCGAAGG |
| 2776 | GAGCCAAUGCCCCGAAGGG |
| 2777 | AGCCAAUGCCCCGAAGGGA |
| 2778 | GCCAAUGCCCCGAAGGGAA |
| 2779 | CCAAUGCCCCGAAGGGAAA |
| 2780 | CAAUGCCCCGAAGGGAAAA |
| 2781 | AAUGCCCCGAAGGGAAAAG |
| 2782 | AUGCCCCGAAGGGAAAAGG |
| 2783 | UGCCCCGAAGGGAAAAGGA |
| 2784 | GCCCCGAAGGGAAAAGGAA |
| 2785 | CCCCGAAGGGAAAAGGAAG |
| 2786 | CCCGAAGGGAAAAGGAAGA |
| 2787 | CCGAAGGGAAAAGGAAGAA |
| 2788 | CGAAGGGAAAAGGAAGAAA |
| 2789 | GAAGGGAAAAGGAAGAAAA |
| 2790 | AAGGGAAAAGGAAGAAAAA |
| 2791 | AGGGAAAAGGAAGAAAAAG |
| 2792 | GGGAAAAGGAAGAAAAAGG |
| 2793 | GGAAAAGGAAGAAAAAGGA |
| 2794 | GAAAAGGAAGAAAAAGGAC |
| 2795 | AAAAGGAAGAAAAAGGACG |
| 2796 | AAAGGAAGAAAAAGGACGA |
| 2797 | AAGGAAGAAAAAGGACGAG |
| 2798 | AGGAAGAAAAAGGACGAGC |
| 2799 | GGAAGAAAAAGGACGAGCA |
| 2800 | GAAGAAAAAGGACGAGCAA |
| 2801 | AAGAAAAAGGACGAGCAAG |
| 2802 | AGAAAAAGGACGAGCAAGG |
| 2803 | GAAAAAGGACGAGCAAGGA |
| 2804 | AAAAAGGACGAGCAAGGAA |
| 2805 | AAAAGGACGAGCAAGGAAA |
| 2806 | AAAGGACGAGCAAGGAAAG |
| 2807 | AAGGACGAGCAAGGAAAGC |
| 2808 | AGGACGAGCAAGGAAAGCA |
| 2809 | GGACGAGCAAGGAAAGCAA |
| 2810 | GACGAGCAAGGAAAGCAAG |
| 2811 | ACGAGCAAGGAAAGCAAGA |
| 2812 | CGAGCAAGGAAAGCAAGAU |
| 2813 | GAGCAAGGAAAGCAAGAUA |
| 2814 | AGCAAGGAAAGCAAGAUAA |
| 2815 | GCAAGGAAAGCAAGAUAAU |
| 2816 | CAAGGAAAGCAAGAUAAUA |
| 2817 | AAGGAAAGCAAGAUAAUAC |
| 2818 | AGGAAAGCAAGAUAAUACA |
| 2819 | GGAAAGCAAGAUAAUACAA |
| 2820 | GAAAGCAAGAUAAUACAAA |
| 2821 | AAAGCAAGAUAAUACAAAC |
| 2822 | AAGCAAGAUAAUACAAACG |
| 2823 | AGCAAGAUAAUACAAACGG |
| 2824 | GCAAGAUAAUACAAACGGG |
| 2825 | CAAGAUAAUACAAACGGGA |
| 2826 | AAGAUAAUACAAACGGGAA |
| 2827 | AGAUAAUACAAACGGGAAC |
| 2828 | GAUAAUACAAACGGGAACA |
| 2829 | AUAAUACAAACGGGAACAG |
| 2830 | UAAUACAAACGGGAACAGA |
| 2831 | AAUACAAACGGGAACAGAA |
| 2832 | AUACAAACGGGAACAGAAA |
| 2833 | UACAAACGGGAACAGAAAU |
| 2834 | ACAAACGGGAACAGAAAUC |
| 2835 | CAAACGGGAACAGAAAUCG |
| 2836 | AAACGGGAACAGAAAUCGG |
| 2837 | AACGGGAACAGAAAUCGGA |
| 2838 | ACGGGAACAGAAAUCGGAA |
| 2839 | CGGGAACAGAAAUCGGAAA |
| 2840 | GGGAACAGAAAUCGGAAAG |
| 2841 | GGAACAGAAAUCGGAAAGA |
| 2842 | GAACAGAAAUCGGAAAGAC |
| 2843 | AACAGAAAUCGGAAAGACA |
| 2844 | ACAGAAAUCGGAAAGACAC |
| 2845 | CAGAAAUCGGAAAGACACC |
| 2846 | AGAAAUCGGAAAGACACCA |
| 2847 | GAAAUCGGAAAGACACCAA |
| 2848 | AAAUCGGAAAGACACCAAA |
| 2849 | AAUCGGAAAGACACCAAAG |
| 2850 | AUCGGAAAGACACCAAAGA |
| 2851 | UCGGAAAGACACCAAAGAU |
| 2852 | CGGAAAGACACCAAAGAUG |
| 2853 | GGAAAGACACCAAAGAUGC |
| 2854 | GAAAGACACCAAAGAUGCA |
| 2855 | AAAGACACCAAAGAUGCAA |
| 2856 | AAGACACCAAAGAUGCAAA |
| 2857 | AGACACCAAAGAUGCAAAG |
| 2858 | GACACCAAAGAUGCAAAGU |
| 2859 | ACACCAAAGAUGCAAAGUC |
| 2860 | CACCAAAGAUGCAAAGUCU |
| 2861 | ACCAAAGAUGCAAAGUCUG |
| 2862 | CCAAAGAUGCAAAGUCUGG |
| 2863 | CAAAGAUGCAAAGUCUGGC |
| 2864 | AAAGAUGCAAAGUCUGGCA |
| 2865 | AAGAUGCAAAGUCUGGCAC |
| 2866 | AGAUGCAAAGUCUGGCACC |
| 2867 | GAUGCAAAGUCUGGCACCA |
| 2868 | AUGCAAAGUCUGGCACCAA |
| 2869 | UGCAAAGUCUGGCACCAAG |
| 2870 | GCAAAGUCUGGCACCAAGA |
| 2871 | CAAAGUCUGGCACCAAGAA |
| 2872 | AAAGUCUGGCACCAAGAAG |
| 2873 | AAGUCUGGCACCAAGAAGA |
| 2874 | AGUCUGGCACCAAGAAGAG |
| 2875 | GUCUGGCACCAAGAAGAGG |
| 2876 | UCUGGCACCAAGAAGAGGA |
| 2877 | CUGGCACCAAGAAGAGGAA |
| 2878 | UGGCACCAAGAAGAGGAAG |
| 2879 | GGCACCAAGAAGAGGAAGA |
| 2880 | GCACCAAGAAGAGGAAGAG |
| 2881 | CACCAAGAAGAGGAAGAGC |
| 2882 | ACCAAGAAGAGGAAGAGCA |
| 2883 | CCAAGAAGAGGAAGAGCAA |
| 2884 | CAAGAAGAGGAAGAGCAAA |
| 2885 | AAGAAGAGGAAGAGCAAAC |
| 2886 | AGAAGAGGAAGAGCAAACA |
| 2887 | GAAGAGGAAGAGCAAACAG |
| 2888 | AAGAGGAAGAGCAAACAGA |
| 2889 | AGAGGAAGAGCAAACAGAG |
| 2890 | GAGGAAGAGCAAACAGAGG |
| 2891 | AGGAAGAGCAAACAGAGGG |
| 2892 | GGAAGAGCAAACAGAGGGG |
| 2893 | GAAGAGCAAACAGAGGGGG |
| 2894 | AAGAGCAAACAGAGGGGGG |
| 2895 | AGAGCAAACAGAGGGGGGC |
| 2896 | GAGCAAACAGAGGGGGGCU |
| 2897 | AGCAAACAGAGGGGGGCUG |
| 2898 | GCAAACAGAGGGGGGCUGU |
| 2899 | CAAACAGAGGGGGGCUGUG |
| 2900 | AAACAGAGGGGGGCUGUGG |
| 2901 | AACAGAGGGGGGCUGUGGC |
| 2902 | ACAGAGGGGGGCUGUGGCC |
| 2903 | CAGAGGGGGGCUGUGGCCC |
| 2904 | AGAGGGGGGCUGUGGCCCC |
| 2905 | GAGGGGGGCUGUGGCCCCC |
| 2906 | AGGGGGGCUGUGGCCCCCA |
| 2907 | GGGGGGCUGUGGCCCCCAC |
| 2908 | GGGGGCUGUGGCCCCCACC |
| 2909 | GGGGCUGUGGCCCCCACCA |
| 2910 | GGGCUGUGGCCCCCACCAC |
| 2911 | GGCUGUGGCCCCCACCACA |
| 2912 | GCUGUGGCCCCCACCACAU |
| 2913 | CUGUGGCCCCCACCACAUC |
| 2914 | UGUGGCCCCCACCACAUCC |
| 2915 | GUGGCCCCCACCACAUCCG |
| 2916 | UGGCCCCCACCACAUCCGC |
| 2917 | GGCCCCCACCACAUCCGCC |
| 2918 | GCCCCCACCACAUCCGCCA |
| 2919 | CCCCCACCACAUCCGCCAG |
| 2920 | CCCCACCACAUCCGCCAGC |
| 2921 | CCCACCACAUCCGCCAGCC |
| 2922 | CCACCACAUCCGCCAGCCC |
| 2923 | CACCACAUCCGCCAGCCCU |
| 2924 | ACCACAUCCGCCAGCCCUG |
| 2925 | CCACAUCCGCCAGCCCUGC |
| 2926 | CACAUCCGCCAGCCCUGCC |
| 2927 | ACAUCCGCCAGCCCUGCCC |
| 2928 | CAUCCGCCAGCCCUGCCCA |
| 2929 | AUCCGCCAGCCCUGCCCAA |
| 2930 | UCCGCCAGCCCUGCCCAAU |
| 2931 | CCGCCAGCCCUGCCCAAUA |
| 2932 | CGCCAGCCCUGCCCAAUAG |
| 2933 | GCCAGCCCUGCCCAAUAGC |
| 2934 | CCAGCCCUGCCCAAUAGCU |
| 2935 | CAGCCCUGCCCAAUAGCUG |
| 2936 | AGCCCUGCCCAAUAGCUGC |
| 2937 | GCCCUGCCCAAUAGCUGCC |
| 2938 | CCCUGCCCAAUAGCUGCCC |
| 2939 | CCUGCCCAAUAGCUGCCCC |
| 2940 | CUGCCCAAUAGCUGCCCCU |
| 2941 | UGCCCAAUAGCUGCCCCUU |
| 2942 | GCCCAAUAGCUGCCCCUUU |
| 2943 | CCCAAUAGCUGCCCCUUUA |
| 2944 | CCAAUAGCUGCCCCUUUAC |
| 2945 | CAAUAGCUGCCCCUUUACG |
| 2946 | AAUAGCUGCCCCUUUACGU |
| 2947 | AUAGCUGCCCCUUUACGUC |
| 2948 | UAGCUGCCCCUUUACGUCA |
| 2949 | AGCUGCCCCUUUACGUCAC |
| 2950 | GCUGCCCCUUUACGUCACC |
| 2951 | CUGCCCCUUUACGUCACCU |
| 2952 | UGCCCCUUUACGUCACCUG |
| 2953 | GCCCCUUUACGUCACCUGA |
| 2954 | CCCCUUUACGUCACCUGAC |
| 2955 | CCCUUUACGUCACCUGACG |
| 2956 | CCUUUACGUCACCUGACGG |
| 2957 | CUUUACGUCACCUGACGGC |
| 2958 | UUUACGUCACCUGACGGCA |
| 2959 | UUACGUCACCUGACGGCAA |
| 2960 | UACGUCACCUGACGGCAAG |
| 2961 | ACGUCACCUGACGGCAAGA |
| 2962 | CGUCACCUGACGGCAAGAC |
| 2963 | GUCACCUGACGGCAAGACU |
| 2964 | UCACCUGACGGCAAGACUU |
| 2965 | CACCUGACGGCAAGACUUC |
| 2966 | ACCUGACGGCAAGACUUCA |
| 2967 | CCUGACGGCAAGACUUCAU |
| 2968 | CUGACGGCAAGACUUCAUU |
| 2969 | UGACGGCAAGACUUCAUUG |
| 2970 | GACGGCAAGACUUCAUUGC |
| 2971 | ACGGCAAGACUUCAUUGCU |
| 2972 | CGGCAAGACUUCAUUGCUG |
| 2973 | GGCAAGACUUCAUUGCUGC |
| 2974 | GCAAGACUUCAUUGCUGCU |
| 2975 | CAAGACUUCAUUGCUGCUA |
| 2976 | AAGACUUCAUUGCUGCUAU |
| 2977 | AGACUUCAUUGCUGCUAUG |
| 2978 | GACUUCAUUGCUGCUAUGU |
| 2979 | ACUUCAUUGCUGCUAUGUA |
| 2980 | CUUCAUUGCUGCUAUGUAU |
| 2981 | UUCAUUGCUGCUAUGUAUA |
| 2982 | UCAUUGCUGCUAUGUAUAU |
| 2983 | CAUUGCUGCUAUGUAUAUG |
| 2984 | AUUGCUGCUAUGUAUAUGA |
| 2985 | UUGCUGCUAUGUAUAUGAA |
| 2986 | UGCUGCUAUGUAUAUGAAA |
| 2987 | GCUGCUAUGUAUAUGAAAG |
| 2988 | CUGCUAUGUAUAUGAAAGC |
| 2989 | UGCUAUGUAUAUGAAAGCU |
| 2990 | GCUAUGUAUAUGAAAGCUU |
| 2991 | CUAUGUAUAUGAAAGCUUU |
| 2992 | UAUGUAUAUGAAAGCUUUA |
| 2993 | AUGUAUAUGAAAGCUUUAU |
| 2994 | UGUAUAUGAAAGCUUUAUU |
| 2995 | GUAUAUGAAAGCUUUAUUG |
| 2996 | UAUAUGAAAGCUUUAUUGA |
| 2997 | AUAUGAAAGCUUUAUUGAA |
| 2998 | UAUGAAAGCUUUAUUGAAC |
| 2999 | AUGAAAGCUUUAUUGAACC |
| 3000 | UGAAAGCUUUAUUGAACCA |
| 3001 | GAAAGCUUUAUUGAACCAG |
| 3002 | AAAGCUUUAUUGAACCAGA |
| 3003 | AAGCUUUAUUGAACCAGAG |
| 3004 | AGCUUUAUUGAACCAGAGC |
| 3005 | GCUUUAUUGAACCAGAGCA |
| 3006 | CUUUAUUGAACCAGAGCAC |
| 3007 | UUUAUUGAACCAGAGCACU |
| 3008 | UUAUUGAACCAGAGCACUG |
| 3009 | UAUUGAACCAGAGCACUGC |
| 3010 | AUUGAACCAGAGCACUGCU |
| 3011 | UUGAACCAGAGCACUGCUA |
| 3012 | UGAACCAGAGCACUGCUAC |
| 3013 | GAACCAGAGCACUGCUACA |
| 3014 | AACCAGAGCACUGCUACAC |
| 3015 | ACCAGAGCACUGCUACACA |
| 3016 | CCAGAGCACUGCUACACAA |
| 3017 | CAGAGCACUGCUACACAAC |
| 3018 | AGAGCACUGCUACACAACA |
| 3019 | GAGCACUGCUACACAACAU |
| 3020 | AGCACUGCUACACAACAUU |
| 3021 | GCACUGCUACACAACAUUA |
| 3022 | CACUGCUACACAACAUUAC |
| 3023 | ACUGCUACACAACAUUACA |
| 3024 | CUGCUACACAACAUUACAC |
| 3025 | UGCUACACAACAUUACACA |
| 3026 | GCUACACAACAUUACACAU |
| 3027 | CUACACAACAUUACACAUG |
| 3028 | UACACAACAUUACACAUGU |
| 3029 | ACACAACAUUACACAUGUC |
| 3030 | CACAACAUUACACAUGUCA |
| 3031 | ACAACAUUACACAUGUCAG |
| 3032 | CAACAUUACACAUGUCAGA |
| 3033 | AACAUUACACAUGUCAGAA |
| 3034 | ACAUUACACAUGUCAGAAA |
| 3035 | CAUUACACAUGUCAGAAAG |
| 3036 | AUUACACAUGUCAGAAAGA |
| 3037 | UUACACAUGUCAGAAAGAC |
| 3038 | UACACAUGUCAGAAAGACA |
| 3039 | ACACAUGUCAGAAAGACAG |
| 3040 | CACAUGUCAGAAAGACAGA |
| 3041 | ACAUGUCAGAAAGACAGAG |
| 3042 | CAUGUCAGAAAGACAGAGC |
| 3043 | AUGUCAGAAAGACAGAGCU |
| 3044 | UGUCAGAAAGACAGAGCUA |
| 3045 | GUCAGAAAGACAGAGCUAU |
| 3046 | UCAGAAAGACAGAGCUAUA |
| 3047 | CAGAAAGACAGAGCUAUAC |
| 3048 | AGAAAGACAGAGCUAUACU |
| 3049 | GAAAGACAGAGCUAUACUC |
| 3050 | AAAGACAGAGCUAUACUCC |
| 3051 | AAGACAGAGCUAUACUCCU |
| 3052 | AGACAGAGCUAUACUCCUA |
| 3053 | GACAGAGCUAUACUCCUAG |
| 3054 | ACAGAGCUAUACUCCUAGA |
| 3055 | CAGAGCUAUACUCCUAGAC |
| 3056 | AGAGCUAUACUCCUAGACU |
| 3057 | GAGCUAUACUCCUAGACUC |
| 3058 | AGCUAUACUCCUAGACUCG |
| 3059 | GCUAUACUCCUAGACUCGA |
| 3060 | CUAUACUCCUAGACUCGAC |
| 3061 | UAUACUCCUAGACUCGACA |
| 3062 | AUACUCCUAGACUCGACAG |
| 3063 | UACUCCUAGACUCGACAGA |
| 3064 | ACUCCUAGACUCGACAGAA |
| 3065 | CUCCUAGACUCGACAGAAG |
| 3066 | UCCUAGACUCGACAGAAGC |
| 3067 | CCUAGACUCGACAGAAGCC |
| 3068 | CUAGACUCGACAGAAGCCA |
| 3069 | UAGACUCGACAGAAGCCAC |
| 3070 | AGACUCGACAGAAGCCACA |
| 3071 | GACUCGACAGAAGCCACAU |
| 3072 | ACUCGACAGAAGCCACAUC |
| 3073 | CUCGACAGAAGCCACAUCC |
| 3074 | UCGACAGAAGCCACAUCCA |
| 3075 | CGACAGAAGCCACAUCCAC |
| 3076 | GACAGAAGCCACAUCCACA |
| 3077 | ACAGAAGCCACAUCCACAA |
| 3078 | CAGAAGCCACAUCCACAAC |
| 3079 | AGAAGCCACAUCCACAACA |
| 3080 | GAAGCCACAUCCACAACAC |
| 3081 | AAGCCACAUCCACAACACU |
| 3082 | AGCCACAUCCACAACACUU |
| 3083 | GCCACAUCCACAACACUUA |
| 3084 | CCACAUCCACAACACUUAA |
| 3085 | CACAUCCACAACACUUAAG |
| 3086 | ACAUCCACAACACUUAAGG |
| 3087 | CAUCCACAACACUUAAGGA |
| 3088 | AUCCACAACACUUAAGGAG |
| 3089 | UCCACAACACUUAAGGAGG |
| 3090 | CCACAACACUUAAGGAGGC |
| 3091 | CACAACACUUAAGGAGGCG |
| 3092 | ACAACACUUAAGGAGGCGG |
| 3093 | CAACACUUAAGGAGGCGGU |
| 3094 | AACACUUAAGGAGGCGGUA |
| 3095 | ACACUUAAGGAGGCGGUAC |
| 3096 | CACUUAAGGAGGCGGUACC |
| 3097 | ACUUAAGGAGGCGGUACCC |
| 3098 | CUUAAGGAGGCGGUACCCC |
| 3099 | UUAAGGAGGCGGUACCCCC |
| 3100 | UAAGGAGGCGGUACCCCCG |
| 3101 | AAGGAGGCGGUACCCCCGG |
| 3102 | AGGAGGCGGUACCCCCGGC |
| 3103 | GGAGGCGGUACCCCCGGCA |
| 3104 | GAGGCGGUACCCCCGGCAC |
| 3105 | AGGCGGUACCCCCGGCACC |
| 3106 | GGCGGUACCCCCGGCACCA |
| 3107 | GCGGUACCCCCGGCACCAU |
| 3108 | CGGUACCCCCGGCACCAUG |
| 3109 | GGUACCCCCGGCACCAUGA |
| 3110 | GUACCCCCGGCACCAUGAA |
| 3111 | UACCCCCGGCACCAUGAAU |
| 3112 | ACCCCCGGCACCAUGAAUG |
| 3113 | CCCCCGGCACCAUGAAUGG |
| 3114 | CCCCGGCACCAUGAAUGGC |
| 3115 | CCCGGCACCAUGAAUGGCA |
| 3116 | CCGGCACCAUGAAUGGCAU |
| 3117 | CGGCACCAUGAAUGGCAUC |
| 3118 | GGCACCAUGAAUGGCAUCC |
| 3119 | GCACCAUGAAUGGCAUCCA |
| 3120 | CACCAUGAAUGGCAUCCAU |
| 3121 | ACCAUGAAUGGCAUCCAUU |
| 3122 | CCAUGAAUGGCAUCCAUUG |
| 3123 | CAUGAAUGGCAUCCAUUGG |
| 3124 | AUGAAUGGCAUCCAUUGGG |
| 3125 | UGAAUGGCAUCCAUUGGGG |
| 3126 | GAAUGGCAUCCAUUGGGGC |
| 3127 | AAUGGCAUCCAUUGGGGCA |
| 3128 | AUGGCAUCCAUUGGGGCAG |
| 3129 | UGGCAUCCAUUGGGGCAGU |
| 3130 | GGCAUCCAUUGGGGCAGUG |
| 3131 | GCAUCCAUUGGGGCAGUGG |
| 3132 | CAUCCAUUGGGGCAGUGGG |
| 3133 | AUCCAUUGGGGCAGUGGGA |
| 3134 | UCCAUUGGGGCAGUGGGAC |
| 3135 | CCAUUGGGGCAGUGGGACA |
| 3136 | CAUUGGGGCAGUGGGACAC |
| 3137 | AUUGGGGCAGUGGGACACU |
| 3138 | UUGGGGCAGUGGGACACUG |
| 3139 | UGGGGCAGUGGGACACUGC |
| 3140 | GGGGCAGUGGGACACUGCA |
| 3141 | GGGCAGUGGGACACUGCAG |
| 3142 | GGCAGUGGGACACUGCAGG |
| 3143 | GCAGUGGGACACUGCAGGA |
| 3144 | CAGUGGGACACUGCAGGAC |
| 3145 | AGUGGGACACUGCAGGACC |
| 3146 | GUGGGACACUGCAGGACCA |
| 3147 | UGGGACACUGCAGGACCAG |
| 3148 | GGGACACUGCAGGACCAGA |
| 3149 | GGACACUGCAGGACCAGAG |
| 3150 | GACACUGCAGGACCAGAGG |
| 3151 | ACACUGCAGGACCAGAGGU |
| 3152 | CACUGCAGGACCAGAGGUG |
| 3153 | ACUGCAGGACCAGAGGUGA |
| 3154 | CUGCAGGACCAGAGGUGAG |
| 3155 | UGCAGGACCAGAGGUGAGG |
| 3156 | GCAGGACCAGAGGUGAGGA |
| 3157 | CAGGACCAGAGGUGAGGAU |
| 3158 | AGGACCAGAGGUGAGGAUG |
| 3159 | GGACCAGAGGUGAGGAUGA |
| 3160 | GACCAGAGGUGAGGAUGAA |
| 3161 | ACCAGAGGUGAGGAUGAAC |
| 3162 | CCAGAGGUGAGGAUGAACC |
| 3163 | CAGAGGUGAGGAUGAACCA |
| 3164 | AGAGGUGAGGAUGAACCAA |
| 3165 | GAGGUGAGGAUGAACCAAG |
| 3166 | AGGUGAGGAUGAACCAAGG |
| 3167 | GGUGAGGAUGAACCAAGGA |
| 3168 | GUGAGGAUGAACCAAGGAU |
| 3169 | UGAGGAUGAACCAAGGAUG |
| 3170 | GAGGAUGAACCAAGGAUGG |
| 3171 | AGGAUGAACCAAGGAUGGG |
| 3172 | GGAUGAACCAAGGAUGGGG |
| 3173 | GAUGAACCAAGGAUGGGGG |
| 3174 | AUGAACCAAGGAUGGGGGC |
| 3175 | UGAACCAAGGAUGGGGGCA |
| 3176 | GAACCAAGGAUGGGGGCAU |
| 3177 | AACCAAGGAUGGGGGCAUG |
| 3178 | ACCAAGGAUGGGGGCAUGG |
| 3179 | CCAAGGAUGGGGGCAUGGG |
| 3180 | CAAGGAUGGGGGCAUGGGG |
| 3181 | AAGGAUGGGGGCAUGGGGC |
| 3182 | AGGAUGGGGGCAUGGGGCC |
| 3183 | GGAUGGGGGCAUGGGGCCU |
| 3184 | GAUGGGGGCAUGGGGCCUU |
| 3185 | AUGGGGGCAUGGGGCCUUG |
| 3186 | UGGGGGCAUGGGGCCUUGG |
| 3187 | GGGGGCAUGGGGCCUUGGG |
| 3188 | GGGGCAUGGGGCCUUGGGA |
| 3189 | GGGCAUGGGGCCUUGGGAC |
| 3190 | GGCAUGGGGCCUUGGGACA |
| 3191 | GCAUGGGGCCUUGGGACAC |
| 3192 | CAUGGGGCCUUGGGACACU |
| 3193 | AUGGGGCCUUGGGACACUU |
| 3194 | UGGGGCCUUGGGACACUUG |
| 3195 | GGGGCCUUGGGACACUUGC |
| 3196 | GGGCCUUGGGACACUUGCC |
| 3197 | GGCCUUGGGACACUUGCCU |
| 3198 | GCCUUGGGACACUUGCCUU |
| 3199 | CCUUGGGACACUUGCCUUG |
| 3200 | CUUGGGACACUUGCCUUGU |
| 3201 | UUGGGACACUUGCCUUGUG |
| 3202 | UGGGACACUUGCCUUGUGC |
| 3203 | GGGACACUUGCCUUGUGCC |
| 3204 | GGACACUUGCCUUGUGCCC |
| 3205 | GACACUUGCCUUGUGCCCA |
| 3206 | ACACUUGCCUUGUGCCCAG |
| 3207 | CACUUGCCUUGUGCCCAGC |
| 3208 | ACUUGCCUUGUGCCCAGCC |
| 3209 | CUUGCCUUGUGCCCAGCCA |
| 3210 | UUGCCUUGUGCCCAGCCAG |
| 3211 | UGCCUUGUGCCCAGCCAGC |
| 3212 | GCCUUGUGCCCAGCCAGCC |
| 3213 | CCUUGUGCCCAGCCAGCCA |
| 3214 | CUUGUGCCCAGCCAGCCAC |
| 3215 | UUGUGCCCAGCCAGCCACG |
| 3216 | UGUGCCCAGCCAGCCACGU |
| 3217 | GUGCCCAGCCAGCCACGUG |
| 3218 | UGCCCAGCCAGCCACGUGG |
| 3219 | GCCCAGCCAGCCACGUGGA |
| 3220 | CCCAGCCAGCCACGUGGAC |
| 3221 | CCAGCCAGCCACGUGGACU |
| 3222 | CAGCCAGCCACGUGGACUG |
| 3223 | AGCCAGCCACGUGGACUGG |
| 3224 | GCCAGCCACGUGGACUGGA |
| 3225 | CCAGCCACGUGGACUGGAU |
| 3226 | CAGCCACGUGGACUGGAUU |
| 3227 | AGCCACGUGGACUGGAUUU |
| 3228 | GCCACGUGGACUGGAUUUC |
| 3229 | CCACGUGGACUGGAUUUCU |
| 3230 | CACGUGGACUGGAUUUCUG |
| 3231 | ACGUGGACUGGAUUUCUGC |
| 3232 | CGUGGACUGGAUUUCUGCU |
| 3233 | GUGGACUGGAUUUCUGCUC |
| 3234 | UGGACUGGAUUUCUGCUCU |
| 3235 | GGACUGGAUUUCUGCUCUU |
| 3236 | GACUGGAUUUCUGCUCUUC |
| 3237 | ACUGGAUUUCUGCUCUUCC |
| 3238 | CUGGAUUUCUGCUCUUCCA |
| 3239 | UGGAUUUCUGCUCUUCCAG |
| 3240 | GGAUUUCUGCUCUUCCAGA |
| 3241 | GAUUUCUGCUCUUCCAGAC |
| 3242 | AUUUCUGCUCUUCCAGACC |
| 3243 | UUUCUGCUCUUCCAGACCG |
| 3244 | UUCUGCUCUUCCAGACCGG |
| 3245 | UCUGCUCUUCCAGACCGGG |
| 3246 | CUGCUCUUCCAGACCGGGG |
| 3247 | UGCUCUUCCAGACCGGGGA |
| 3248 | GCUCUUCCAGACCGGGGAA |
| 3249 | CUCUUCCAGACCGGGGAAC |
| 3250 | UCUUCCAGACCGGGGAACU |
| 3251 | CUUCCAGACCGGGGAACUG |
| 3252 | UUCCAGACCGGGGAACUGG |
| 3253 | UCCAGACCGGGGAACUGGA |
| 3254 | CCAGACCGGGGAACUGGAC |
| 3255 | CAGACCGGGGAACUGGACU |
| 3256 | AGACCGGGGAACUGGACUC |
| 3257 | GACCGGGGAACUGGACUCA |
| 3258 | ACCGGGGAACUGGACUCAC |
| 3259 | CCGGGGAACUGGACUCACA |
| 3260 | CGGGGAACUGGACUCACAU |
| 3261 | GGGGAACUGGACUCACAUA |
| 3262 | GGGAACUGGACUCACAUAA |
| 3263 | GGAACUGGACUCACAUAAA |
| 3264 | GAACUGGACUCACAUAAAG |
| 3265 | AACUGGACUCACAUAAAGG |
| 3266 | ACUGGACUCACAUAAAGGC |
| 3267 | CUGGACUCACAUAAAGGCA |
| 3268 | UGGACUCACAUAAAGGCAA |
| 3269 | GGACUCACAUAAAGGCAAU |
| 3270 | GACUCACAUAAAGGCAAUG |
| 3271 | ACUCACAUAAAGGCAAUGU |
| 3272 | CUCACAUAAAGGCAAUGUC |
| 3273 | UCACAUAAAGGCAAUGUCC |
| 3274 | CACAUAAAGGCAAUGUCCU |
| 3275 | ACAUAAAGGCAAUGUCCUC |
| 3276 | CAUAAAGGCAAUGUCCUCU |
| 3277 | AUAAAGGCAAUGUCCUCUU |
| 3278 | UAAAGGCAAUGUCCUCUUU |
| 3279 | AAAGGCAAUGUCCUCUUUC |
| 3280 | AAGGCAAUGUCCUCUUUCU |
| 3281 | AGGCAAUGUCCUCUUUCUC |
| 3282 | GGCAAUGUCCUCUUUCUCU |
| 3283 | GCAAUGUCCUCUUUCUCUU |
| 3284 | CAAUGUCCUCUUUCUCUUC |
| 3285 | AAUGUCCUCUUUCUCUUCC |
| 3286 | AUGUCCUCUUUCUCUUCCC |
| 3287 | UGUCCUCUUUCUCUUCCCC |
| 3288 | GUCCUCUUUCUCUUCCCCC |
| 3289 | UCCUCUUUCUCUUCCCCCC |
| 3290 | CCUCUUUCUCUUCCCCCCA |
| 3291 | CUCUUUCUCUUCCCCCCAA |
| 3292 | UCUUUCUCUUCCCCCCAAC |
| 3293 | CUUUCUCUUCCCCCCAACC |
| 3294 | UUUCUCUUCCCCCCAACCC |
| 3295 | UUCUCUUCCCCCCAACCCU |
| 3296 | UCUCUUCCCCCCAACCCUU |
| 3297 | CUCUUCCCCCCAACCCUUU |
| 3298 | UCUUCCCCCCAACCCUUUA |
| 3299 | CUUCCCCCCAACCCUUUAU |
| 3300 | UUCCCCCCAACCCUUUAUU |
| 3301 | UCCCCCCAACCCUUUAUUU |
| 3302 | CCCCCCAACCCUUUAUUUU |
| 3303 | CCCCCAACCCUUUAUUUUG |
| 3304 | CCCCAACCCUUUAUUUUGU |
| 3305 | CCCAACCCUUUAUUUUGUG |
| 3306 | CCAACCCUUUAUUUUGUGU |
| 3307 | CAACCCUUUAUUUUGUGUU |
| 3308 | AACCCUUUAUUUUGUGUUU |
| 3309 | ACCCUUUAUUUUGUGUUUU |
| 3310 | CCCUUUAUUUUGUGUUUUA |
| 3311 | CCUUUAUUUUGUGUUUUAA |
| 3312 | CUUUAUUUUGUGUUUUAAG |
| 3313 | UUUAUUUUGUGUUUUAAGC |
| 3314 | UUAUUUUGUGUUUUAAGCU |
| 3315 | UAUUUUGUGUUUUAAGCUG |
| 3316 | AUUUUGUGUUUUAAGCUGU |
| 3317 | UUUUGUGUUUUAAGCUGUA |
| 3318 | UUUGUGUUUUAAGCUGUAU |
| 3319 | UUGUGUUUUAAGCUGUAUG |
| 3320 | UGUGUUUUAAGCUGUAUGA |
| 3321 | GUGUUUUAAGCUGUAUGAC |
| 3322 | UGUUUUAAGCUGUAUGACU |
| 3323 | GUUUUAAGCUGUAUGACUU |
| 3324 | UUUUAAGCUGUAUGACUUU |
| 3325 | UUUAAGCUGUAUGACUUUA |
| 3326 | UUAAGCUGUAUGACUUUAU |
| 3327 | UAAGCUGUAUGACUUUAUC |
| 3328 | AAGCUGUAUGACUUUAUCA |
| 3329 | AGCUGUAUGACUUUAUCAC |
| 3330 | GCUGUAUGACUUUAUCACU |
| 3331 | CUGUAUGACUUUAUCACUG |
| 3332 | UGUAUGACUUUAUCACUGA |
| 3333 | GUAUGACUUUAUCACUGAG |
| 3334 | UAUGACUUUAUCACUGAGA |
| 3335 | AUGACUUUAUCACUGAGAA |
| 3336 | UGACUUUAUCACUGAGAAU |
| 3337 | GACUUUAUCACUGAGAAUA |
| 3338 | ACUUUAUCACUGAGAAUAA |
| 3339 | CUUUAUCACUGAGAAUAAU |
| 3340 | UUUAUCACUGAGAAUAAUA |
| 3341 | UUAUCACUGAGAAUAAUAC |
| 3342 | UAUCACUGAGAAUAAUACA |
| 3343 | AUCACUGAGAAUAAUACAU |
| 3344 | UCACUGAGAAUAAUACAUG |
| 3345 | CACUGAGAAUAAUACAUGU |
| 3346 | ACUGAGAAUAAUACAUGUU |
| 3347 | CUGAGAAUAAUACAUGUUA |
| 3348 | UGAGAAUAAUACAUGUUAA |
| 3349 | GAGAAUAAUACAUGUUAAA |
| 3350 | AGAAUAAUACAUGUUAAAC |
| 3351 | GAAUAAUACAUGUUAAACG |
| 3352 | AAUAAUACAUGUUAAACGU |
| 3353 | AUAAUACAUGUUAAACGUU |
| 3354 | UAAUACAUGUUAAACGUUU |
| 3355 | AAUACAUGUUAAACGUUUG |
| 3356 | AUACAUGUUAAACGUUUGU |
| 3357 | UACAUGUUAAACGUUUGUG |
| 3358 | ACAUGUUAAACGUUUGUGG |
| 3359 | CAUGUUAAACGUUUGUGGU |
| 3360 | AUGUUAAACGUUUGUGGUA |
| 3361 | UGUUAAACGUUUGUGGUAA |
| 3362 | GUUAAACGUUUGUGGUAAG |
| 3363 | UUAAACGUUUGUGGUAAGA |
| 3364 | UAAACGUUUGUGGUAAGAG |
| 3365 | AAACGUUUGUGGUAAGAGG |
| 3366 | AACGUUUGUGGUAAGAGGU |
| 3367 | ACGUUUGUGGUAAGAGGUC |
| 3368 | CGUUUGUGGUAAGAGGUCA |
| 3369 | GUUUGUGGUAAGAGGUCAG |
| 3370 | UUUGUGGUAAGAGGUCAGU |
| 3371 | UUGUGGUAAGAGGUCAGUG |
| 3372 | UGUGGUAAGAGGUCAGUGG |
| 3373 | GUGGUAAGAGGUCAGUGGU |
| 3374 | UGGUAAGAGGUCAGUGGUA |
| 3375 | GGUAAGAGGUCAGUGGUAU |
| 3376 | GUAAGAGGUCAGUGGUAUC |
| 3377 | UAAGAGGUCAGUGGUAUCU |
| 3378 | AAGAGGUCAGUGGUAUCUG |
| 3379 | AGAGGUCAGUGGUAUCUGC |
| 3380 | GAGGUCAGUGGUAUCUGCC |
| 3381 | AGGUCAGUGGUAUCUGCCC |
| 3382 | GGUCAGUGGUAUCUGCCCU |
| 3383 | GUCAGUGGUAUCUGCCCUG |
| 3384 | UCAGUGGUAUCUGCCCUGA |
| 3385 | CAGUGGUAUCUGCCCUGAA |
| 3386 | AGUGGUAUCUGCCCUGAAU |
| 3387 | GUGGUAUCUGCCCUGAAUC |
| 3388 | UGGUAUCUGCCCUGAAUCU |
| 3389 | GGUAUCUGCCCUGAAUCUG |
| 3390 | GUAUCUGCCCUGAAUCUGC |
| 3391 | UAUCUGCCCUGAAUCUGCU |
| 3392 | AUCUGCCCUGAAUCUGCUU |
| 3393 | UCUGCCCUGAAUCUGCUUC |
| 3394 | CUGCCCUGAAUCUGCUUCA |
| 3395 | UGCCCUGAAUCUGCUUCAA |
| 3396 | GCCCUGAAUCUGCUUCAAA |
| 3397 | CCCUGAAUCUGCUUCAAAG |
| 3398 | CCUGAAUCUGCUUCAAAGA |
| 3399 | CUGAAUCUGCUUCAAAGAG |
| 3400 | UGAAUCUGCUUCAAAGAGU |
| 3401 | GAAUCUGCUUCAAAGAGUU |
| 3402 | AAUCUGCUUCAAAGAGUUA |
| 3403 | AUCUGCUUCAAAGAGUUAU |
| 3404 | UCUGCUUCAAAGAGUUAUU |
| 3405 | CUGCUUCAAAGAGUUAUUU |
| 3406 | UGCUUCAAAGAGUUAUUUC |
| 3407 | GCUUCAAAGAGUUAUUUCA |
| 3408 | CUUCAAAGAGUUAUUUCAA |
| 3409 | UUCAAAGAGUUAUUUCAAA |
| 3410 | UCAAAGAGUUAUUUCAAAU |
| 3411 | CAAAGAGUUAUUUCAAAUU |
| 3412 | AAAGAGUUAUUUCAAAUUA |
| 3413 | AAGAGUUAUUUCAAAUUAA |
| 3414 | AGAGUUAUUUCAAAUUAAA |
| 3415 | GAGUUAUUUCAAAUUAAAA |
| 3416 | AGUUAUUUCAAAUUAAAAG |
| 3417 | GUUAUUUCAAAUUAAAAGC |
| 3418 | UUAUUUCAAAUUAAAAGCA |
| 3419 | UAUUUCAAAUUAAAAGCAA |
| 3420 | AUUUCAAAUUAAAAGCAAA |
| 3421 | UUUCAAAUUAAAAGCAAAA |
| 3422 | UUCAAAUUAAAAGCAAAAC |
| 3423 | UCAAAUUAAAAGCAAAACA |
| 3424 | CAAAUUAAAAGCAAAACAA |
| 3425 | AAAUUAAAAGCAAAACAAA |
| 3426 | AAUUAAAAGCAAAACAAAA |
| 3427 | AUUAAAAGCAAAACAAAAC |
| 3428 | UUAAAAGCAAAACAAAACA |
| 3429 | UAAAAGCAAAACAAAACAA |
| 3430 | AAAAGCAAAACAAAACAAA |

[0059] The double-stranded regions should be at least 19 contiguous nucleotides, for example about 19 to 23 nucleotides, or may be longer, for example 30 or 50 nucleotides, or 100 nucleotides or more. The full-length sequence corresponding to the entire gene transcript may be used. Preferably, they are about 19 to about 100 nucleotides in length, more preferably about 19 to about 50 nucleotides in length, and even more preferably about 19 to about 23 nucleotides in length.

[0060] The degree of identity of a double-stranded region of a nucleic acid molecule to the targeted transcript should be at least 90% and more preferably 95-100%. The % identity of a nucleic acid molecule is determined by GAP (Needleman and Wunsch, 1970) analysis (GCG program) with a gap creation penalty=5, and a gap extension penalty=0.3. Preferably, the two sequences are aligned over their entire length.

[0061] The nucleic acid molecule may of course comprise sequences unrelated to the target which may function to stabilize the molecule.

[0062] The term “short interfering RNA” or “siRNA” as used herein refers to a nucleic acid molecule which comprises ribonucleotides capable of inhibiting or down regulating gene expression, for example by mediating RNAi in a sequence-specific manner, wherein the double stranded portion is less than 50 nucleotides in length, preferably about 19 to about 23 nucleotides in length. For example, the siRNA can be a nucleic acid molecule comprising self-complementary sense and antisense regions, wherein the antisense region comprises a nucleotide sequence that is complementary to nucleotide sequence in a target nucleic acid molecule or a portion thereof and the sense region having nucleotide sequence corresponding to the target nucleic acid sequence or a portion thereof. The siRNA can be assembled from two separate oligonucleotides, where one strand is the sense strand and the other is the antisense strand, wherein the antisense and sense strands are self-complementary.

[0063] As used herein, the term siRNA is equivalent to other terms used to describe nucleic acid molecules that are capable of mediating sequence specific RNAi, for example micro-RNA (miRNA), short hairpin RNA (shRNA), short interfering oligonucleotide, short interfering nucleic acid (siNA), short interfering modified oligonucleotide, chemically-modified siRNA, and others. In addition, as used herein, the term RNAi is equivalent to other terms used to describe sequence specific RNA interference, such as post transcriptional gene silencing, translational inhibition, or epigenetics. For example, siRNA molecules of the invention can be used to epigenetically silence genes at both the post-transcriptional level or the pre-transcriptional level. In a non-limiting example, epigenetic regulation of gene expression by siRNA molecules of the invention can result from siRNA mediated modification of chromatin structure to alter gene expression.

[0064] Preferred siRNA molecules comprise a nucleotide sequence that is identical to about 19 to 23 contiguous nucleotides of the target mRNA. In an embodiment, the target mRNA sequence commences with the dinucleotide AA, comprises a GC-content of about 30-70% (preferably, 30-60%, more preferably 40-60% and more preferably about 45%-55%), and does not have a high percentage identity to any nucleotide sequence other than the target in the genome of the avian (preferably chickens) in which it is to be introduced, e.g., as determined by standard BLAST search.

[0065] By “shRNA” or “short-hairpin RNA” is meant an siRNA molecule where less than about 50 nucleotides, preferably about 19 to about 23 nucleotides, is base paired with a complementary sequence located on the same RNA molecule, and where said sequence and complementary sequence are separated by an unpaired region of at least about 4 to 15 nucleotides which forms a single-stranded loop above the stem structure created by the two regions of base complementarity. Examples of sequences of a single-stranded loops are 5′ UUCAAGAGA 3′ and 5′ UUUGUGUAG 3′.

[0066] Included shRNAs are dual or bi-finger and multi-finger hairpin dsRNAs, in which the RNA molecule comprises two or more of such stem-loop structures separated by single-stranded spacer regions.

[0067] siRNAs can be generated in vitro by using a recombinant enzyme, such as T7 RNA polymerase, and DNA oligonucleotide templates, or can be prepared in vivo, for example, in cultured cells. In a preferred embodiment, the nucleic acid molecule is produced synthetically.

[0068] Strategies have been described for producing a hairpin siRNA from vectors containing, for example, a RNA polymerase III promoter. Various vectors have been constructed for generating hairpin siRNAs in host cells using either an H1-RNA or an snU6 RNA promoter (see SEQ ID NO's 7 to 9). A RNA molecule as described above (e.g., a first portion, a linking sequence, and a second portion) can be operably linked to such a promoter. When transcribed by RNA polymerase III, the first and second portions form a duplexed stem of a hairpin and the linking sequence forms a loop. The pSuper vector (OligoEngines Ltd., Seattle, Wash.) can also be used to generate siRNA.

[0069] Modifications or analogs of nucleotides can be introduced to improve the properties of the nucleic acid molecules of the invention. Improved properties include increased nuclease resistance and/or increased ability to permeate cell membranes. Accordingly, the terms “nucleic acid molecule” and “double-stranded RNA molecule” includes synthetically modified bases such as, but not limited to, inosine, xanthine, hypoxanthine, 2-aminoadenine, 6-methyl-, 2-propyl- and other alkyl-adenines, 5-halo uracil, 5-halo cytosine, 6-aza cytosine and 6-aza thymine, pseudo uracil, 4-thiuracil, 8-halo adenine, 8-aminoadenine, 8-thiol adenine, 8-thiolalkyl adenines, 8-hydroxyl adenine and other 8-substituted adenines, 8-halo guanines, 8-amino guanine, 8-thiol guanine, 8-thioalkyl guanines, 8-hydroxyl guanine and other substituted guanines, other aza and deaza adenines, other aza and deaza guanines, 5-trifluoromethyl uracil and 5-trifluoro cytosine.

### Vectors and Host Cells

[0070] The present invention also provides a vector encoding a nucleic acid molecule comprising a double-stranded region, or single strand thereof, of the present invention. Preferably, the vector is an expression vector capable of expressing the open reading frame(s) encoding a dsRNA in a host cell and/or cell free system. The host cell can be any cell type such as, not limited to, bacterial, fungal, plant or animal cells, preferably an avian cell.

[0071] Typically, a vector of the invention comprises a promoter operably linked to an open reading frame encoding a nucleic acid molecule of the invention, or a strand thereof.

[0072] As used herein, the term “promoter” refers to a nucleic acid sequence which is able to direct transcription of an operably linked nucleic acid molecule and includes, for example, RNA polymerase II and RNA polymerase III promoters. Also included in this definition are those transcriptional regulatory elements (e.g., enhancers) that are sufficient to render promoter-dependent gene expression controllable in a cell type-specific, tissue-specific, or temporal-specific manner, or that are inducible by external agents or signals.

[0073] “Operably linked” as used herein refers to a functional relationship between two or more nucleic acid (e.g., DNA) segments. Typically, it refers to the functional relationship of a transcriptional regulatory element to a transcribed sequence. For example, a promoter is operably linked to a coding sequence, such as an open reading frame encoding a double-stranded RNA molecule defined herein, if it stimulates or modulates the transcription of the coding sequence in an appropriate cell. Generally, promoter transcriptional regulatory elements that are operably linked to a transcribed sequence are physically contiguous to the transcribed sequence, i.e., they are cis-acting. However, some transcriptional regulatory elements, such as enhancers, need not be physically contiguous or located in close proximity to the coding sequences whose transcription they enhance.

[0074] By “RNA polymerase III promoter” or “RNA pol III promoter” or “polymerase III promoter” or “pol III promoter” is meant any invertebrate, vertebrate, or mammalian promoter, e.g., chicken, human, murine, porcine, bovine, primate, simian, etc. that, in its native context in a cell, associates or interacts with RNA polymerase III to transcribe its operably linked gene, or any variant thereof, natural or engineered, that will interact in a selected host cell with an RNA polymerase III to transcribe an operably linked nucleic acid sequence. By U6 promoter (e.g., chicken U6, human U6, murine U6), H1 promoter, or 7SK promoter is meant any invertebrate, vertebrate, or mammalian promoter or polymorphic variant or mutant found in nature to interact with RNA polymerase III to transcribe its cognate RNA product, i.e., U6 RNA, H1 RNA, or 7SK RNA, respectively. Examples of suitable promoters include cU6-1 (SEQ ID NO:7), cU6-3 (SEQ ID NO:8), cU6-4 (SEQ ID NO:9) and c7SK (SEQ ID NO:10).

[0075] When E. coli is used as a host cell, there is no limitation other than that the vector should have an “ori” to amplify and mass-produce the vector in E. coli (e.g., JM109. DH5α, HB101, or XL1Blue), and a marker gene for selecting the transformed E. coli (e.g., a drug-resistance gene selected by a drug such as ampicillin, tetracycline, kanamycin, or chloramphenicol). For example, M13-series vectors, pUC-series vectors, pBR322, pBluescript, pCR-Script, and such can be used. pGEM-T, pDIRECT, pT7, and so on can also be used for subcloning and excision of the gene encoding the dsRNA as well as the vectors described above.

[0076] With regard to expression vectors for use in E. coli, such vectors include JM109, DH5α, HB101, or XL1 Blue, the vector should have a promoter such as lacZ promoter, araB promoter, or T7 promoter that can efficiently promote the expression of the desired gene in E. coli. Other examples of the vectors are “QIAexpress system” (Qiagen), pEGFP, and pET (for this vector, BL21, a strain expressing T7 RNA polymerase, is preferably used as the host).

[0077] In addition to the vectors for E. coli, for example, the vector may be a mammal-derived expression vector (e.g., pcDNA3 (Invitrogen), pEGF-BOS, pEF, and pCDM8), an insect cell-derived expression vector (e.g., “Bac-to-BAC baculovairus expression system” (GibcoBRL) and pBacPAK8), a plant-derived expression vector (e.g., pMH1 and pMH2), an animal virus-derived expression vector (e.g., pHSV, pMV, and pAdexLcw), a retrovirus-derived expression vector (e.g., pZIPneo), a yeast-derived expression vector (e.g., “Pichia Expression Kit” (Invitrogen), pNV11, and SP-Q01), or a Bacillus subtilis-derived expression vector (e.g., pPL608 and pKTH50).

[0078] In order to express nucleic acid molecules in animal cells, such as CHO, COS, Vero and NIH3T3 cells, the vector should have a promoter necessary for expression in such cells, e.g., SV40 promoter, MMLV-LTR promoter, EF1α promoter, CMV promoter, etc., and more preferably it has a marker gene for selecting transformants (for example, a drug resistance gene selected by a drug (e.g., neomycin, G418, etc.). Examples of vectors with these characteristics include pMAM, pDR2, pBK-RSV, pBK-CMV, pOPRSV and pOPI3.

[0079] Nucleic acid molecules comprising a double-stranded region of the present invention can be expressed in animals such as avians by, for example, inserting an open reading frame(s) encoding the nucleic acid into an appropriate vector and introducing the vector by the retrovirus method, liposome method, cationic liposome method, adenovirus method, and so on. The vectors used include, but are not limited to, adenoviral vectors (e.g., pAdexlcw) and retroviral vectors (e.g., pZIPneo). General techniques for gene manipulation, such as insertion of nucleic acids of the invention into a vector, can be performed according to conventional methods.

[0080] The present invention also provides a host cell into which an exogenous nucleic acid molecule, typically in a vector of the present invention, has been introduced. The host cell of this invention can be used as, for example, a production system for producing or expressing the nucleic acid molecule. For in vitro production, eukaryotic cells or prokaryotic cells can be used.

[0081] Useful eukaryotic host cells may be animal, plant, or fungi cells. As animal cells, mammalian cells such as CHO, COS, 3T3, myeloma, baby hamster kidney (BHK), HeLa, or Vero cells MDCK cells, DF1 cells, amphibian cells such as Xenopus oocytes, or insect cells such as Sf9, Sf21, or Tn5 cells can be used. CHO cells lacking DHFR gene (dhfr-CHO) or CHO K-1 may also be used. The vector can be introduced into the host cell by, for example, the calcium phosphate method, the DEAE-dextran method, cationic liposome DOTAP (Boehringer Mannheim) method, electroporation, lipofection, etc.

[0082] Useful prokaryotic cells include bacterial cells, such as E. coli, for example, JM109, DH5α, and HB101, or Bacillus subtilis.

[0083] Culture medium such as DMEM, MEM, RPMI-1640, or IMDM may be used for animal cells. The culture medium can be used with or without serum supplement such as fetal calf serum (FCS). The pH of the culture medium is preferably between about 6 and 8. Cells are typically cultured at about 30 to 40° C. for about 15 to 200 hr, and the culture medium may be replaced, aerated, or stirred if necessary.

### Compositions

[0084] The present invention also provides compositions comprising a nucleic acid molecule comprising a double-stranded region that can be administered to an avian egg. A composition comprising a nucleic acid molecule comprising a double-stranded region may contain a pharmaceutically acceptable carrier to render the composition suitable for administration.

[0085] Suitable pharmaceutical carriers, excipients and/or diluents include, but are not limited to, lactose, sucrose, starch powder, talc powder, cellulose esters of alkonoic acids, magnesium stearate, magnesium oxide, crystalline cellulose, methyl cellulose, carboxymethyl cellulose, gelatin, glycerin, sodium alginate, antibacterial agents, antifungal agents, gum arabic, acacia gum, sodium and calcium salts of phosphoric and sulfuric acids, polyvinylpyrrolidone and/or polyvinyl alcohol, saline, and water. In an embodiment, the carrier, excipient and/or diluent is phosphate buffered saline or water.

[0086] In an embodiment, the composition may also comprise a transfection promoting agent. Transfection promoting agents used to facilitate the uptake of nucleic acids into a living cell are well known within the art. Reagents enhancing transfection include chemical families of the types; polycations, dendrimers, DEAE Dextran, block copolymers and cationic lipids. Preferably, the transfection-promoting agent is a lipid-containing compound (or formulation), providing a positively charged hydrophilic region and a fatty acyl hydrophobic region enabling self-assembly in aqueous solution into vesicles generally known as micelles or liposomes, as well as lipopolyamines.

[0087] In another embodiment, the composition comprises a polymeric biomaterial such as chitosan.

[0088] It is understood that any conventional media or agent may be used so long as it is not incompatible with the compositions or methods of the invention.

### Administration

[0089] Administration of a nucleic acid molecule comprising a double-stranded region (including a composition comprising a nucleic acid molecule comprising a double-stranded region) is conveniently achieved by injection into the egg, and generally injection into the chorion allantoic fluid. Notwithstanding that the air sac is the preferred route of in ovo administration, other regions such as the yolk sac, air sac or amnionic cavity (amnion) may also be inoculated by injection. The hatchability rate might decrease slightly when the air sac is not the target for the administration although not necessarily at commercially unacceptable levels. The mechanism of injection is not critical to the practice of the present invention, although it is preferred that the needle does not cause undue damage to the egg or to the tissues and organs of the developing embryo or the extra-embryonic membranes surrounding the embryo.

[0090] Preferably, the nucleic acid molecule is administered within four days of the egg having been laid.

[0091] Generally, a hypodermic syringe fitted with an approximately 22 gauge needle is suitable. The method of the present invention is particularly well adapted for use with an automated injection system, such as those described in U.S. Pat. No. 4,903,635, U.S. Pat. No. 5,056,464, U.S. Pat. No. 5,136,979 and US 20060075973.

[0092] The nucleic acid molecule is administered in an effective amount sufficient to modify sex in at least some of the eggs which have been administered. The modification can be detected by comparing a suitable number of samples subjected to the method of the invention to a similar number that have not. Statistically significant variation in the sex of the birds between the two groups will be indicative that an effective amount has been administered. Other means of determining an effective amount for sex are well within the capacity of those skilled in the art.

[0093] Preferably, about 1 ng to 100 μg, more preferably about 100 ng to 1 μg, of nucleic acid is administered to the egg. Furthermore, it is preferred that the nucleic acid to be administered is in a volume of about 1 μl to 1 ml, more preferably about 10 μl to 500 μl.

### EXAMPLES

### Example 1

### Identification of shRNA Molecules for Down-Regulating DMRT1 Protein Production in Chickens

[0094] Selection of shRNA Sequences Targeting DMRT1

[0095] The present inventors identified 51 predicted shRNA sequences to target chicken Dmrt1 (Table 4).

[0096] There are several algorithms available to select potential siRNA sequences for specific target genes. Taxman et al. (2006) have specifically designed an algorithm to predict effective shRNA molecules and the present inventors have made their own modification to the algorithm to improve shRNA prediction. There are four criteria for shRNA selection using the Taxman algorithm. Three of the criteria are scored for out of a maximum number of 4 points. These criteria are: 1) C or G on the 5′ end of the sequence=1 point, A or T on 5′ end=−1 point; 2) A or T on the 3′ end=1 point, C or G on the 3′ end=−1 point; 3) 5 or more A or T in the seven 3′ bases=2 points, 4 A or T in the seven 3′ bases=1 point. shRNA sequences with the highest scores are preferred. The fourth criteria is based on a calculation for the free-energy of the 6 central bases of the shRNA sequence (bases 6-11 of the sense strand hybridised to bases 9-14 of the antisense strand). shRNAs with a central duplex ΔG>−12.9 kcal/mol are preferred.

[0097] The shRNA designer website uses this algorithm to provide a score for each shRNA target. Based on the algorithm and their calculated ΔG value, the present inventors chose 4 of the shRNA target finder shRNA sequences as potentially effective shRNAs to test for their ability to knockdown Dmrt1 gene expression. The selected sequences are shown in their 5′-3′ sequence in Table 5. These 4 sequences were used to construct ddRNAi plasmids for the expression of the 6 shRNAs.

Construction of ddRNAi Plasmids for Expression of Selected shRNAs

[0098] To construct the Dmrt1 shRNA expression constructs, two oligonucleotides complementary to each other were designed to contain the sense, loop, antisense and termination signal, followed by a spacer sequence (GGAA) and a BamHI restriction site for screening. In addition, the “bottom oligo (B)” or reverse oligonucleotide contained a SalI overhang at the 5′ end for insertion into the expression vector containing the chicken polymerase III promoter cU6-4 (DQ531570). Table 6 lists the shRNA targets to their corresponding oligonucleotides. The complementary oligonucleotides for each target shRNA, were annealed together and ligated into the PmeI-SalI digested pU6-4 vector. Full length clones were positive if linearised by BamHI digestion. All shRNA expression vectors were sequence confirmed. The four constructs were referred to as 105sh, 240sh, 465sh and 591sh as shown in FIG. 1. The non-silencing control shRNA construct (NSsh) was designed in the same way. However, the sequence used was that of an irrelevant target (ie. NP gene of influenza).

[0099] Each ddRNAi plasmid was constructed so that the start of each shRNA sequence was at the +1 position of the native U6 snRNA transcripts. All final shRNA expression vectors consisted of either one of the full length chicken U6 promoters, a shRNA sense sequence, a loop sequence, a shRNA antisense sequence, a termination sequence and a BamHI site. The loop sequence used in all shRNAs was 5′ UUCAAGAGA 3′.

TABLE 4
Algorithm selection of shRNA sequences targeting
Dmrt1.

| Target Sequence | Start Position | SEQ ID NO | Score |
|---|---|---|---|
| GGCACAAGCGGTTCTGCAT | 79 | 3435 | 3 |
| GACTGCCAGTGCAAGAAGT | 105 | 3436 | 3 |
| CTGAGCCAGTTGTCAAGAA | 238 | 3437 | 3 |
| GAGCCAGTTGTCAAGAAGA | 240 | 3438 | 3 |
| GACGGATGCTCATTCAGGA | 355 | 3439 | 3 |
| GCACGTCTGATTTGGTTGT | 409 | 3440 | 3 |
| GTGGACTCCACCTACTACA | 426 | 3441 | 3 |
| CCAGCCATCCCTGTATCCT | 455 | 3442 | 3 |
| CCATCCCTGTATCCTTACT | 459 | 3443 | 3 |
| CATCCCTGTATCCTTACTA | 460 | 3444 | 3 |
| CCCTGTATCCTTACTATAA | 463 | 3445 | 4 |
| CTGTATCCTTACTATAACA | 465 | 3446 | 4 |
| CTTACTATAACAACCTGTA | 472 | 3447 | 3 |
| CTCCCAGTACCAAATGGCA | 497 | 3448 | 3 |
| GCCACTGAGTCTTCCTCAA | 519 | 3449 | 3 |
| CTGAGTCTTCCTCAAGTGA | 523 | 3450 | 3 |
| GAGTCTTCCTCAAGTGAGA | 525 | 3451 | 3 |
| CTCCCAGCAACATACATGT | 591 | 3452 | 4 |
| CCCAGCAACATACATGTCA | 593 | 3453 | 3 |
| CCAGCAACATACATGTCAA | 594 | 3454 | 3 |
| CAGATGAAGGGAATGGAGA | 633 | 3455 | 3 |
| CCACCTGCGTCACACAGAT | 733 | 3456 | 3 |
| CACCTGCGTCACACAGATA | 734 | 3457 | 3 |
| CCTGCGTCACACAGATACT | 736 | 3458 | 3 |
| CTCCTACTCAGAGTCGAAA | 773 | 3459 | 3 |
| CACTGTTGCCTTGTTCTGT | 967 | 3460 | 3 |
| GGTGCCGTGATGTGTTTGT | 1189 | 3461 | 3 |
| GTGCCGTGATGTGTTTGTA | 1190 | 3462 | 4 |
| GCCGTGATGTGTTTGTAGT | 1192 | 3463 | 4 |
| CCTCGTATCGCCAAATTAA | 1239 | 3464 | 4 |
| GCCTCGACTTAGATTGCAA | 1283 | 3465 | 3 |
| CCTCGACTTAGATTGCAAT | 1284 | 3466 | 4 |
| CTCGACTTAGATTGCAATA | 1285 | 3467 | 4 |
| CGACTTAGATTGCAATATA | 1287 | 3468 | 4 |
| GACTTAGATTGCAATATAA | 1288 | 3469 | 4 |
| GCGGCCAGCAAACAAGTCT | 1307 | 3470 | 3 |
| GGCCAGCAAACAAGTCTCA | 1309 | 3471 | 3 |
| GCCAGCAAACAAGTCTCAA | 1310 | 3472 | 3 |
| CCAGCAAACAAGTCTCAAA | 1311 | 3473 | 3 |
| GCGTTTCTGCGAGTGTTAT | 1342 | 3474 | 4 |
| GTGTCCTCTTCCTGTGTTA | 1381 | 3475 | 3 |
| GTCCTCTTCCTGTGTTACA | 1383 | 3476 | 3 |
| CCTCTTCCTGTGTTACAGA | 1385 | 3477 | 3 |
| CTCTTCCTGTGTTACAGAA | 1386 | 3478 | 4 |
| GAAGCCAACCTGAAATGAA | 1402 | 3479 | 4 |
| GCCAACCTGAAATGAAACT | 1405 | 3480 | 4 |
| CCAACCTGAAATGAAACTA | 1406 | 3481 | 4 |
| CCTGAAATGAAACTAGTCT | 1410 | 3482 | 3 |
| GTTGCAGCTGTACCTGAAA | 1452 | 3483 | 3 |
| GCAGCTGTACCTGAAATAA | 1455 | 3484 | 4 |
| CAGCTGTACCTGAAATAAA | 1456 | 3485 | 4 |

TABLE 5
Sequence of Dmrt1 shRNAs.

| Target | | | | |
|---|---|---|---|---|
| Number | Position | Target Sequence | Score | ΔG |
| 1 | 105 bp | GACTGCCAGTGCAAGAAGT | 3 | −17.1 |
| | | (SEQ ID NO: 3436) | | |
| 2 | 240 bp | GAGCCAGTTGTCAAGAAGA | 3 | −12.7 |
| | | (SEQ ID NO: 3438) | | |
| 3 | 465 bp | CTGTATCCTTACTATAACA | 4 | −11.9 |
| | | (SEQ ID NO: 3446) | | |
| 4 | 591 bp | CTCCCAGCAACATACATGT | 4 | −14.0 |
| | | (SEQ ID NO: 3452) | | |

Testing Selected shRNAs for Knockdown of Dmrt1 Gene Expression

[0100] A reporter gene expression assay was used to test shRNAs for silencing of Dmrt1. The reporter gene was a transcriptional gene fusion of Dmrt1 inserted downstream of the 3′ end of the Enhanced Green Fluorescent Protein (EGFP) gene in pEGFP-C (Clontech). The reporter plasmid was constructed as follows: cDNA of Dmrt1 was reverse transcribed from total RNA isolated from 4 day old embryo's and cloned into the multiple cloning site of pCMV-Script (Stratagene). The Dmrt1 insert was removed from the cloning vector as a NotI-EcoRI fragment and cloned downstream of the EGFP gene in pEGFP-C (Clontech). The resulting plasmid was named pEGFP-Dmrt1. This plasmid was transfected into chicken DF-1 cells and expression of the transcriptional gene fusion was confirmed by measuring EGFP fluorescence using flow cytometry as described below.

[0101] Dmrt1 gene silencing assays were conducted by co-transfecting DF-1 cells with the pEGFP-Dmrt1 reporter plasmid and each of the ddRNAi plasmids expressing the Dmrt1 specific and control shRNAs. The co-transfection experiments were performed as follows: DF-1 cells (ATCC CRL-12203, chicken fibroblast) were maintained in a humidified atmosphere containing 5% CO₂ at 37° C. in Dulbecco's Modified Eagle's Medium (DMEM) containing 4.5 g/l glucose, 1.5 g/l sodium bicarbonate, 10% foetal calf serum (FCS), 2 mM L-glutamine supplemented with penicillin (100 Um') and streptomycin (100 μg/ml). DF1 cells were passaged as required using 0.25% (w/v) trypsin-ethylenediaminetetraacetic acid (EDTA).

TABLE 6
Sequence and details of primers used.

| Target | | | | |
|---|---|---|---|---|
| Number | Position | Target Sequence | Score | ΔG |
| 1 | 105 bp | GACTGCCAGTGCAAGAAGT | 3 | −17.1 |
| | | (SEQ ID NO: 3436) | | |

DMRT1-105T-U6.4
GACTGCCAGTGCAAGAAGTTTCAAGAGAACTTCTTGCACTGGCAGTCTTT
TTGGAAGGATCC (SEQ ID NO: 3486)
DMRT1-105B-U6.4
TCGAGGATCCTTCCAAAAAGACTGCCAGTGCAAGAAGTTCTCTTGAAAC
TTCTTGCACTGGCAGTC (SEQ ID NO: 3487)

| Target | | | | |
|---|---|---|---|---|
| Number | Position | Target Sequence | Score | ΔG |
| 2 | 240 bp | GAGCCAGTTGTCAAGAAGA | 3 | −12.7 |
| | | (SEQ ID NO: 3438) | | |

DMRT1-240T-U6.4
GAGCCAGTTGTCAAGAAGATTCAAGAGATCTTCTTGACAACTGGCTCTTT
TTGGAAGGATCC (SEQ ID NO: 3488)
DMRT1-240B-U6.4
TCGAGGATCCTTCCAAAAAGAGCCAGTTGTCAAGAAGATCTCTTGAATCT
TCTTGACAACTGGCTC (SEQ ID NO: 3489)

| Target | | | | |
|---|---|---|---|---|
| Number | Position | Target Sequence | Score | ΔG |
| 3 | 465 bp | CTGTATCCTTACTATAACA | 4 | −11.9 |
| | | (SEQ ID NO: 3446) | | |

DMRT1-465T-U6.4
CTGTATCCTTACTATAACATTCAAGAGATGTTATAGTAAGGATACAGTTT
TTGGAAGGATCC (SEQ ID NO: 3490)
DMRT1-465B-U6.4
TCGAGGATCCTTCCAAAAACTGTATCCTTACTATAACATCTCTTGAATGT
TATAGTAAGGATACAG (SEQ ID NO: 3491)

| Target | | | | |
|---|---|---|---|---|
| Number | Position | Target Sequence | Score | ΔG |
| 4 | 591 bp | CTCCCAGCAACATACATGT | 4 | −14.0 |
| | | (SEQ ID NO: 3452) | | |

DMRT1-591T-U6.4
CTCCCAGCAACATACATGTTTCAAGAGAACATGTATGTTGCTGGGAGTTT
TTGGAAGGATCC (SEQ ID NO: 3492)
DMRT1-591B-U6.4
TCGAGGATCCTTCCAAAAACTCCCAGCAACATACATGTTCTCTTGAAACA
TGTATGTTGCTGGGAG (SEQ ID NO: 3493)
Bold = spacer sequence;
Italics = BamHI restriction site;
Underline = SalI overhang

[0102] Co-transfection of pEGFP-Dmrt1 and ddRNAi plasmids for EGFP-Dmrt1 fusion silencing assays was conducted in DF-1 cells grown to 80-90% confluence, in 24 well culture plates (Nunc) for flow cytometry analysis. Cells were transfected with a total of 1 μg of plasmid DNA, per well, using Lipofectamine™2000 transfection reagent (Invitrogen). EGFP expression was analysed in transfected DF-1 cells at 60 hours post-transfection using flow cytometry analysis of transfections performed in triplicate. Cells were trypsinised using 100 μl of 0.25% trypsin-EDTA, pelleted at 2000 rpm for 5 minutes, washed once in 1 ml of cold phosphate buffered saline-A (PBSA) (Oxoid), twice in 1 ml of FACS-wash solution (PBSA+1% FCS) and resuspended in 250 μl of FACS-wash solution. Flow cytometry sampling was performed using a FACScalibur (Becton Dickinson) fluorescence activated cell sorter. Data acquisition and calculation of mean fluorescence intensity (MFI) values for triplicate co-transfection samples, was performed using CELLQuest software (Becton Dickinson). The results of the gene silencing assay are shown in FIG. 1. Compared to the negative control irrelevant shRNA expressed from NSsh, the Dmrt1 specific shRNAs were observed to knockdown expression of the reporter gene to varying levels. Dmrt1 shRNA 240sh induced the greatest level of gene silencing of approximately 60%.

### Example 2

### In Ovo Modulation of DMRT1 Gene Expression in Chickens

[0103] An siRNA targeted to a conserved exon of the chicken DMRT1 gene was designed using the Ambion siRNA Target Finder tool (www.ambion.com). The chosen siRNA was designated DMRT1-343-siRNA (5′-GAGCCAGUUGUCAAGAAGAUU-3′) (SEQ ID NO:3431). The siRNA was synthesized and obtained from Qiagen.

[0104] For in ovo delivery, the siRNA was formulated with lipoefectamine 2000 (Invitrogen) according to the manufacturer's instructions. The now complexed siRNA was then delivered in ovo at a dose of either 100 μmol or 200 μmol. The siRNA was injected into embryonated eggs via an intravenous (I.V.) route or directly into the amnion at embryonic day 4.5 (E4.5). For both I.V. and amnion delivery, a small opening (1 cm×1 cm) was created at the top of the blunt end of the egg so as to avoid the membrane, veins and arteries, and 100 pmol or 200 pmol in a 4 μl volume was then injected directly into a vein or into the amnionic cavity using a micro-capillary pipette. Micro-capillaries of 1 mm diameter were used for injections, and their tips were pulled to a diameter of 40 microns with bevelled tip of 22.5°. After injection, the holes in the eggs were sealed with appropriate sized parafilm squares using a heated scalpel blade.

[0105] In total, 286 embryonated eggs (E4.5) were used in this experiment;

[0106] Group 1: 48 eggs were used as controls and were not injected with the DMRT1-343-siRNA formulation;

[0107] Group 2: 51 eggs were injected I.V. with 100 pmol of siRNA;

[0108] Group 3: 53 eggs were injected I.V. with 200 pmol of siRNA;

[0109] Group 4: 81 eggs were injected into the amnion with 100 pmol of siRNA and;

[0110] Group 5: 53 eggs were injected into the amnion with 200 pmol of siRNA.

[0111] All embryos were incubated until day E10. At E10, all embryos were assessed for viability and then removed from the egg. Control Group 1 had an embryo viability of 100%; Group 2 had a viability of 76%; Group 3 had a viability of 94%; Group 4 had a viability of 40% and; Group 5 had a viability of 75%. A single limb bud from each embryo was removed and used in a sex determination PCR test to determine if the embryos were of male or female genotype. Lower limb buds from each embryo were collected into 50 μl of PCR digestion buffer (50 mM KCl; 10 mM Tris-HCl, pH8.3; 0.1 mg/ml gelatine; 0.45% Nonidet P-40; 0.45% Tween-20; 0.2 mg/ml proteinase K; stock stored at −20° C.) at room temperature and digested at 55° C. for a minimum of 1 h, then at 95° C. for 10 min to release genomic DNA.

[0112] Sexing was carried out by PCR using the method of Clinton et al. (2001). The PCR mix consisted of 1 μl of digestion mix, 10×RedTaq reaction buffer (Sigma-Aldrich), MgCl₂ to 1.5 mM (Promega), 1 unit of RedTaq DNA polymerase (Sigma-Aldrich) and Milli-Q water (Millipore) to a total volume of 20 μl. Reactions were carried out in a Master cycler S (Eppendorf) PCR machine. Products were run on a 1.5% 1×Tris-borate (TBE) agarose gels.

[0113] Once the sex PCR test was complete and analysed, the embryos were definitively labelled as either being genotypically male or female. The embryos were then opened via dissection and the gonads exposed for macroscopic analysis of gonadal development. The gonadal development of all control embryos was normal as expected. Control female embryo's showed typical asymmetric development that was characterised by a large left ovary and smaller regressing right gonad. Control male embryos all had typical bilateral testes. All female embryos from the siRNA knockdown groups (Groups 2-5) had normal gonadal development. In contrast, some male embryos from the siRNA knockdown groups showed varying degrees of female-like asymmetry at the macroscopic level of the gonads. The feminisation effect of the DMRT1-343-siRNA was characterised by an average or small-sized right testis and a larger feminised left gonad (Table 7). Feminisation was observed in a number of male embryos in Groups 2, 3 and 5 and resulted in an increase in the ratio of embryos with female-like gonads in these groups.

TABLE 7
DMRT1 embryo injection results.

| | | | | % |
|---|---|---|---|---|
| | | | | Male:Female |
| siRNA dose | No. | | % Male:Female | Macroscopic |
| and injection | embryos | No. viable at | Genotype | Gonad |
| route | injected | E10 | (PCR sex test) | phenotype |
| Group 1 | 48 | 48 (100%) | 60:40 | 60:40 |
| No injection | | | | |
| control | | | | |
| Group 2 | 51 | 39 (76%) | 59:41 | 54:46 |
| I.V.—100 pmol | | | | |
| Group 3 | 53 | 50 (94%) | 54:46 | 46:54 |
| I.V.—200 pmol | | | | |
| Group 4 | 81 | 33 (40%) | 48:52 | 48:52 |
| Amnion—100 | | | | |
| pmol | | | | |
| Group 5 | 53 | 40 (75%) | 33:67 | 28:72 |
| Amnion—200 | | | | |
| pmol | | | | |

[0114] Gonads from both male and female embryos in each treatment groups were assessed for DMRT1 gene expression using quantitative RT-PCR analysis. Both the female and male gonads were pooled separately from each group and RNA was extracted for cDNA synthesis and qPCR analysis. The pooled gonads were added to 1 ml of Trizol and homogenised well by pipetting and vortexing at room temperature until all gonad tissue had dissolved. 200 μl of chloroform was added and mixed well by inverting the sample for 15 sec. The sample was then incubated at room temperature for 3 min and then centrifuged at 12000 g for 15 min at 4° C. The aqueous phase of the sample was then transferred to a new tube and then 500 l of isopropanol was added and mixed well by inversion. The mix was then incubated at room temperature for 10 min and then centrifuged at 12000 g for 10 min at 4° C. The supernatant was removed from the tube carefully, so as not to disturb the RNA pellet, and the pellet was then washed with 1 ml of 70% ethanol. The tube was then centrifuged at 7500 g for 5 min at 4° C. and the supernatant again was carefully removed and the RNA pellet was air dried at room temperature for 10 min. The RNA pellet was then resuspended in 25 μl of RNase-free water and the final concentration of RNA was determined using a NanoDrop ND-1000 Spectrophotometer (Thermo Scientific). RNA was reverse transcribed to complimentary DNA (cDNA) using the Promega Reverse Transcription kit (Promega). The reaction mix contained 1 μg of RNA, random hexamers (1 μl), dNTPs (2 μl), AMV reverse transcriptase (Promega) (0.5 μl) and nuclease free water added to a total reaction volume of 20 μl. The mix was incubated at 42° C. for 1 hour, followed by a 10 min incubation at 95° C. for enzyme inactivation.

[0115] cDNA was then used to quantify relative DMRT1 gene expression levels in the pooled male and female gonad samples from each treatment group. qPCR primers and probes were designed using Primer Express (Applied Biosystems) software and sequences are shown in Table 8. PCR's were set up in 20 μl reaction volumes that contained 2×TaqMan qRT PCR mastermix (Applied Biosystems), 1 μl of primer/probe mix, 1 μl of cDNA sample and made up to final volume with Nuclease free water (Promega). PCR cycling was performed at 95° C. for 1 min, followed by 40 cycles of 95° C. for 15 sec; 61° C. for 30 sec and; 68° C. for 30 sec. Ct values were obtained at a standard threshold value of 0.2 for all reactions. This threshold value corresponded to the midway point of the logarithmic phase of all amplification plots. Ct values were exported to Microsoft Excel for analysing relative gene expression using the comparative Ct method.

TABLE 8
Primer and probe sequences.

| Sequence Name | Sequence 5′-3′ |
|---|---|
| DMRT1 TaqMan MGB probe | CCATCCCTTTCATCTGCC |
| | (SEQ ID NO: 3494) |
| DMRT1 Forward primer | TCAAGCCAGTCAGGAAAACAGT |
| | (SEQ ID NO: 3495) |
| DMRT1 Reverse primer | TCATGGCATGGCGGTTCT |
| | (SEQ ID NO: 3496) |
| 18S rRNA TaqMan MGB probe | TGCTGGCACCAGACTTGCCCTC |
| | (SEQ ID NO: 3497) |
| 18S rRNA Forward primer | CGGCTACCACATCCAAGGAA |
| | (SEQ ID NO: 3498) |
| 18S rRNA Reverse primer | GCTGGAATTACCGCGGCT |
| | (SEQ ID NO: 3499) |

[0116] Relative levels of DMRT1 mRNA were compared with the chicken house keeping 18S rRNA species across all cDNA samples (FIG. 2). Quantitative RT-PCR analysis confirmed that DMRT1 mRNA expression was specifically reduced in all pooled groups of male embryos when compare to control Group 1. Almost 40% of DMRT1 gene expression knockdown was observed for Group 3 male embryos treated with the DMRT1-343-siRNA. It is interesting to note that Group 3 was also the group that resulted in the greatest degree of observed feminisation of male gonads at the macroscopic level.

[0117] It will be appreciated by persons skilled in the art that numerous variations and/or modifications may be made to the invention as shown in the specific embodiments without departing from the spirit or scope of the invention as broadly described. The present embodiments are, therefore, to be considered in all respects as illustrative and not restrictive.

[0118] All publications discussed and/or referenced herein are incorporated herein in their entirety.

[0119] The present application claims priority from U.S. 61/138,235 filed 17 Dec. 2008, the entire contents of which are incorporated by reference.

[0120] Any discussion of documents, acts, materials, devices, articles or the like which has been included in the present specification is solely for the purpose of providing a context for the present invention. It is not to be taken as an admission that any or all of these matters form part of the prior art base or were common general knowledge in the field relevant to the present invention as it existed before the priority date of each claim of this application.

### REFERENCES

[0121] Clinton et al. (2001) British Poultry Science 42:134-138
[0122] Hori et al. (2000) Mol Biol Cell 11:3645-3660
[0123] Needleman and Wunsch (1970) J Mol Biol 48: 443-453
[0124] O'Neill et al. (2000) Dev Genes Evol 210:243-249
[0125] Raymond et al. (1999) Dev Biol 215:208-220
[0126] Smith et al. (1999) Nature 402:601-602
[0127] Smith et al. (2000) Nature 407: 319-320.
[0128] Taxman et al. (2006) BMC Biotechnol 6:7
[0129] Waterhouse et al. (1998) Proc Natl Acad Sci USA 95:13959-13964

1-20. (canceled)

21. A method of modifying the sex of an avian, the method comprising administering to an avian egg at least one isolated and/or exogenous RNA molecule comprising a double-stranded region (dsRNA) which reduces the level of a protein encoded by an R-spondin gene or Fox9 gene in the avian egg, wherein if the embryo of the egg is male the sex is altered to female following administration of the isolated and/or exogenous RNA molecule, and wherein the RNA molecule is administered to a non-cellular site of the egg and/or the egg is not electroporated.

22. A method of modifying the sex of an avian, the method comprising administering to an avian egg at least one isolated and/or exogenous RNA molecule comprising a double-stranded region (dsRNA) comprising one or more of the sequence of nucleotides provided as SEQ ID NO's 11 to 3431 or a variant of any one or more thereof, wherein the isolated and/or exogenous RNA molecule does not comprise a sequence selected from:
CCAGUUGUCAAGAAGAGCA (SEQ ID NO:254)
GGAUGCUCAUUCAGGACAU (SEQ ID NO:369)
CCCUGUAUCCUUACUAUAA (SEQ ID NO:474)
GCCACUGAGUCUUCCUCAA (SEQ ID NO:530)
CCAGCAACAUACAUGUCAA (SEQ ID NO:605)
CCUGCGUCACACAGAUACU (SEQ ID NO:747)
GGAGUAGUUGUACAGGUUG (SEQ ID NO:3432)
GACUGGCUUGACAUGUAUG (SEQ ID NO:3433)
AUGGCGGUUCUCCAUCCCU (SEQ ID NO:3434) or a variant of any one thereof, and wherein the RNA molecule is administered to a non-cellular site of the egg and/or the egg is not electroporated.

23. A method of modifying the sex of an avian, the method comprising administering to an avian egg at least one isolated and/or exogenous RNA molecule comprising a double-stranded region (dsRNA) which reduces the level of a protein encoded by an β-catenin in the avian egg, wherein the RNA molecule is administered to a non-cellular site of the egg and/or the egg is not electroporated.

24. The method of claim 21, wherein the non-cellular site is the air sac, yolk sac, amnionic cavity or chorion allantoic fluid.

25. The method of claim 22, wherein the non-cellular site is the air sac, yolk sac, amnionic cavity or chorion allantoic fluid.

26. The method of claim 23, wherein the non-cellular site is the air sac, yolk sac, amnionic cavity or chorion allantoic fluid.

27. The method of claim 21, wherein the dsRNA is a siRNA or a shRNA.

28. The method of claim 22, wherein the dsRNA is a siRNA or a shRNA.

29. The method of claim 23, wherein the dsRNA is a siRNA or a shRNA.

30. The method of claim 21, wherein the RNA molecule is administered by injection.

31. The method of claim 22, wherein the RNA molecule is administered by injection.

32. The method of claim 23, wherein the RNA molecule is administered by injection.

33. The method of claim 21, wherein the avian is selected from the group consisting of chickens, ducks, turkeys, geese, bantams and quails.

34. The method of claim 22, wherein the avian is selected from the group consisting of chickens, ducks, turkeys, geese, bantams and quails.

35. The method of claim 23, wherein the avian is selected from the group consisting of chickens, ducks, turkeys, geese, bantams and quails.

36. An avian produced using a method according of claim 21.

37. An avian produced using a method according of claim 22.

38. An avian produced using a method according of claim 23.

The application's sequence listing, which the Patent Office published only in electronic form, follows.

SEQUENCE LISTING (3499 sequences)

SEQ ID NO: 1 - protein, 311 aa, Gallus gallus
PAAGKKLPRLPKCARCRNHGYSSPLKGHKRFCMWRDCQCKKCSLIAERQRVMAVQVALRRQQAQEEELGISHPVPLPSAPEPVVKKSSSSSSCLLQDSSSPAHSTSTVAAAAASAPPEGRMLIQDIPSIPSRGHLESTSDLVVDSTYYSSFYQPSLYPYYNNLYNYSQYQMAVATESSSSETGGTFVGSAMKNSLRSLPATYMSSQSGKQWQMKGMENRHAMSSQYRMCSYYPPTSYLGQGVGSPTCVTQILASEDTPSYSESKARVFSPPSSQDSGLGCLSSSESTKGDLECEPHQEPGAFAVSPVLEGE

SEQ ID NO: 2 - DNA, 1493 bp, Gallus gallus
ccggcggcgggcaagaagctgccgcgtctgcccaagtgtgcccgctgccgcaaccacggctactcctcgccgctgaaggggcacaagcggttctgcatgtggcgggactgccagtgcaagaagtgcagcctgatcgccgagcggcagcgggtgatggccgtgcaggttgcactgaggaggcagcaagcccaggaagaggagctggggatcagccaccctgtacccctgcccagtgcccctgagccagttgtcaagaagagcagcagcagcagctcctgtctcctgcaggacagcagcagccctgctcactccacgagcacggtggcagcagcagcagcgagcgcaccaccagagggacggatgctcattcaggacatcccttccatccccagcagagggcacttggagagcacgtctgatttggttgtggactccacctactacagcagtttttaccagccatccctgtatccttactataacaacctgtacaactactcccagtaccaaatggcagtggccactgagtcttcctcaagtgagacagggggtacgtttgtagggtcagccatgaaaaacagccttcgaagcctcccagcaacatacatgtcaagccagtcaggaaaacagtggcagatgaagggaatggagaaccgccatgccatgagctcccagtaccggatgtgctcctactacccgcccacctcatacctgggccagggggttggcagtcccacctgcgtcacacagatactggcctcggaggacaccccctcctactcagagtcgaaagcgagagtgttttcgccgcccagcagccaggactcgggcctggggtgcctgtcgagcagcgagagcaccaagggagacctggagtgcgagccccaccaagagcccggcgccttcgcggtgagcccggttcttgagggcgagtaggcgcggcgtcgggcggctgctgcgcggcgttcactgttgccttgttctgttggggttgcgggggggcgttgggtttcttctttccggggcggggggggcacggcggggccgcggccgggccggcggggcggggcggggcgggacggggcggggcggagccgcgcgggggccgcagtccgggccggggccgccgtcgggtctcggcccgctcccgtcggggcggagcgtccgacgatcggcctccacgaaacgcggtgccgtgatgtgtttgtagtggttcctcgtaggctccagacgttttctcctcgtatcgccaaattaacgcgttttgcatattacagttgagtgcctcgacttagattgcaatataagcggccagcaaacaagtctcaaaaaaaagttacgtgcgtttctgcgagtgttattttgttaagaacggctcacagtgtcctcttcctgtgttacagaagccaacctgaaatgaaactagtctggaaaaattcattgttctctgtagttgcagctgtacctgaaataaaaatgttattgatgactga

SEQ ID NO: 3 - protein, 130 aa, Gallus gallus
MAGGIVRSPAAWRGGAALLGKVARQEFSANVIREEEPLWTRSALRSMIFHRKLLRFFLAAPQKAVVGLSGAEDCGAPLLGRLMIVGEKCAASLGLTDGFRMAVRYPPSVPSDYRARLCILGGRQLGQPPG

SEQ ID NO: 4 - DNA, 393 bp, Gallus gallus
atggccggcgggatcgttaggtcgccggccgcctggcgcggtggcgccgctctcttgggaaaagtcgcccgccaggagttctccgccaacgttatccgcgaggaggagccgttgtggacgaggagtgccttgcgttccatgatatttcaccgcaagctcctacgctttttcctagccgctccccagaaggccgttgtcgggttatctggagcagaagattgtggcgcacctcttcttgggcgtttgatgattgttggcgagaagtgtgctgctagcctgggcttgaccgatggattccggatggctgtgagatacccaccctcagtcccttcagactaccgcgcgcggctctgtattctgggtggccgtcagttgggccagcctcctggctaa

SEQ ID NO: 5 - protein, 246 aa, Gallus gallus
MDLTGGSKVVKGKRQRRISTELSQGCARGCDLCSEFNGCLRCSPKLFILLERNDIRQIGICLPSCPLGYFGLRNTDMNKCIKCKIENCESCFSRNFCTKCKEGLYLHKGRCYVTCPEGYSAANGTMECSSPAQCEMSEWGPWGPCSKKRKLCGFKKGNEDRTRRILQAPSGDVSLCPATTEVRRCTVQKSQCPEGKRKKKDEQGKQDNTNGNRNRKDTKDAKSGTKKRKSKQRGAVAPTTSASPAQ

SEQ ID NO: 6 - DNA, 741 bp, Gallus gallus
atggatctaacaggcggcagcaaagtggtgaagggcaagaggcaaaggcgaattagcactgagctgagccagggctgtgccaggggctgcgacctgtgctctgagttcaacgggtgcctgagatgttcccccaagctcttcatccttctggagaggaacgatatccggcaaattgggatctgcctcccatcctgtccactgggatactttggccttcgcaatacagacatgaacaagtgcatcaaatgcaaaatcgagaactgtgagtcctgcttcagccgaaacttttgcacaaaatgtaaggaaggtttgtatttgcacaaagggagatgttacgtcacgtgccccgaaggctactctgctgccaatggcaccatggagtgcagcagtcctgcgcaatgtgaaatgagtgagtgggggccctgggggccctgctccaagaagaggaagctgtgtggcttcaagaaggggaacgaggaccgaacgcggcggatcctgcaggctccctctggggacgtgtccctgtgccccgccaccacggaggtgcgcagatgcactgtgcagaagagccaatgccccgaagggaaaaggaagaaaaaggacgagcaaggaaagcaagataatacaaacgggaacagaaatcggaaagacaccaaagatgcaaagtctggcaccaagaagaggaagagcaaacagaggggggctgtggcccccaccacatccgccagccctgcccaatag

SEQ ID NO: 7 - DNA, 325 bp, Gallus gallus
cgaagaaccgagcgctgctggccttaaagtcccaccaaaactctgaagaaacgaagccagacccggcactcagcgggcagcccgcgcctcccgccgccccacagtgccgcgcgcgtgcatttgcatagcgcggtgctcgcagggggaaactcaccccctcaagtccgccccccgcttcccgcccgctgtcccgcacctcatcagtgctgtgcgctgtctgtgtcccccagcacgcactctttgctgttcttacccggaggcttgccctatccttgaggtttctattttttaggctataaataccgcctaggaggtagagatattc

SEQ ID NO: 8 - DNA, 394 bp, Gallus gallus
cagacagacgtcaggctttctaagcctggactgagtaagagcggaagagctccacagcactctgagtgcgcacagaccgcgcgtacagcgcacagccgcgcggccgctccttcaggcactgccgacgacagcccaggcggaggtcctgagcgccggcgctaaatttgcataaagaactacccaggagccctcgcgcgcggaaacgggcaaaaaggggcttctaatatggaaatattacgccgaatcgcgttacaaatcggctaagcgggcctaagagttaacaagatgtgctattaagcggagccttttggtgggaagaaatggagtagtcactgtgttctaaaagaacttgcagaatgagcctttaaataccgcagtctcgatgctcttagtc

SEQ ID NO: 9 - DNA, 287 bp, Gallus gallus
tgaattgtgggacggcggaagacgggctcccgccccgcccctatatgcaaagcagagaacttcccgccgtgcaccgcgcgcaatcggaagagaatttgggcacttcagacccaaaaaaaaacccaaaacttctgcgaaaaagaaagaatctcagcggagtaaatagggatttttgttaaagaggtgataccagaagaagaaatatgcaaatacaacgccagctcaccgctacttaaaaatcatgatataatagaggcttaaatactgtccgagagacactggggttt

SEQ ID NO: 10 - DNA, 783 bp, Gallus gallus
gtccagccatccacctcccaccaatacttccccactgaaccatgtccctcagtagcacagggtttgtggaacgcctcctgggacggtgcctcccccacctgccacgcagcccattccagcacctgacacttctggagacgaaatttttcctaacgtccaacctgagtctcccctggtgcaacttgaggctgttcccctgactcccatcgctagttacgtgggaagaaaagacccctaagaccaccccgtgcaaccaccagcccatccccaccacgcccactgaccgggcccctcagtgccacagcagcacggttctcgagcgcttcgcaggacggtgagcactgcccggaacctctgcacggcctcagcaacgcgactttcagccggggtcgctgcccaggagccggcggcttcggagcgcagagcgaggcgggagagctccggccgcgggaggctcagtgtcacgcagagcgcgggacgagcgctccgagccctcccagtgccgcccccaaggcagggcggccggcgcagctccccgcagcccgccagtgggaaggctctgctttgcataacgcgcaaggcctgctgggaggaaagcggagcgagaaagagcgttaacgtgcgccgagtgttttagagcaaaagcattcagacctgaagcagcgctgagagatgcctctgccgcccatttactggaaacgttcagacccaccgcaagtcaccgtgaccttgagacactgagctgttggccgttatatagcacttggggcagctcgtagcttt

SEQ ID NO: 11 - RNA, 19 nt, Artificial Sequence
  RNA for silencing
ccggcggcgggcaagaagc

SEQ ID NO: 12 - RNA, 19 nt, Artificial Sequence
  RNA for silencing
cggcggcgggcaagaagcu

SEQ ID NO: 13 - RNA, 19 nt, Artificial Sequence
  RNA for silencing
ggcggcgggcaagaagcug

SEQ ID NO: 14 - RNA, 19 nt, Artificial Sequence
  RNA for silencing
gcggcgggcaagaagcugc

SEQ ID NO: 15 - RNA, 19 nt, Artificial Sequence
  RNA for silencing
cggcgggcaagaagcugcc

SEQ ID NO: 16 - RNA, 19 nt, Artificial Sequence
  RNA for silencing
ggcgggcaagaagcugccg

SEQ ID NO: 17 - RNA, 19 nt, Artificial Sequence
  RNA for silencing
gcgggcaagaagcugccgc

SEQ ID NO: 18 - RNA, 19 nt, Artificial Sequence
  RNA for silencing
cgggcaagaagcugccgcg

SEQ ID NO: 19 - RNA, 19 nt, Artificial Sequence
  RNA for silencing
gggcaagaagcugccgcgu

SEQ ID NO: 20 - RNA, 19 nt, Artificial Sequence
  RNA for silencing
ggcaagaagcugccgcguc

SEQ ID NO: 21 - RNA, 19 nt, Artificial Sequence
  RNA for silencing
gcaagaagcugccgcgucu

SEQ ID NO: 22 - RNA, 19 nt, Artificial Sequence
  RNA for silencing
caagaagcugccgcgucug

SEQ ID NO: 23 - RNA, 19 nt, Artificial Sequence
  RNA for silencing
aagaagcugccgcgucugc

SEQ ID NO: 24 - RNA, 19 nt, Artificial Sequence
  RNA for silencing
agaagcugccgcgucugcc

SEQ ID NO: 25 - RNA, 19 nt, Artificial Sequence
  RNA for silencing
gaagcugccgcgucugccc

SEQ ID NO: 26 - RNA, 19 nt, Artificial Sequence
  RNA for silencing
aagcugccgcgucugccca

SEQ ID NO: 27 - RNA, 19 nt, Artificial Sequence
  RNA for silencing
agcugccgcgucugcccaa

SEQ ID NO: 28 - RNA, 19 nt, Artificial Sequence
  RNA for silencing
gcugccgcgucugcccaag

SEQ ID NO: 29 - RNA, 19 nt, Artificial Sequence
  RNA for silencing
cugccgcgucugcccaagu

SEQ ID NO: 30 - RNA, 19 nt, Artificial Sequence
  RNA for silencing
ugccgcgucugcccaagug

SEQ ID NO: 31 - RNA, 19 nt, Artificial Sequence
  RNA for silencing
gccgcgucugcccaagugu

SEQ ID NO: 32 - RNA, 19 nt, Artificial Sequence
  RNA for silencing
ccgcgucugcccaagugug

SEQ ID NO: 33 - RNA, 19 nt, Artificial Sequence
  RNA for silencing
cgcgucugcccaagugugc

SEQ ID NO: 34 - RNA, 19 nt, Artificial Sequence
  RNA for silencing
gcgucugcccaagugugcc

SEQ ID NO: 35 - RNA, 19 nt, Artificial Sequence
  RNA for silencing
cgucugcccaagugugccc

SEQ ID NO: 36 - RNA, 19 nt, Artificial Sequence
  RNA for silencing
gucugcccaagugugcccg

SEQ ID NO: 37 - RNA, 19 nt, Artificial Sequence
  RNA for silencing
ucugcccaagugugcccgc

SEQ ID NO: 38 - RNA, 19 nt, Artificial Sequence
  RNA for silencing
cugcccaagugugcccgcu

SEQ ID NO: 39 - RNA, 19 nt, Artificial Sequence
  RNA for silencing
ugcccaagugugcccgcug

SEQ ID NO: 40 - RNA, 19 nt, Artificial Sequence
  RNA for silencing
gcccaagugugcccgcugc

SEQ ID NO: 41 - RNA, 19 nt, Artificial Sequence
  RNA for silencing
cccaagugugcccgcugcc

SEQ ID NO: 42 - RNA, 19 nt, Artificial Sequence
  RNA for silencing
ccaagugugcccgcugccg

SEQ ID NO: 43 - RNA, 19 nt, Artificial Sequence
  RNA for silencing
caagugugcccgcugccgc

SEQ ID NO: 44 - RNA, 19 nt, Artificial Sequence
  RNA for silencing
aagugugcccgcugccgca

SEQ ID NO: 45 - RNA, 19 nt, Artificial Sequence
  RNA for silencing
agugugcccgcugccgcaa

SEQ ID NO: 46 - RNA, 19 nt, Artificial Sequence
  RNA for silencing
gugugcccgcugccgcaac

SEQ ID NO: 47 - RNA, 19 nt, Artificial Sequence
  RNA for silencing
ugugcccgcugccgcaacc

SEQ ID NO: 48 - RNA, 19 nt, Artificial Sequence
  RNA for silencing
gugcccgcugccgcaacca

SEQ ID NO: 49 - RNA, 19 nt, Artificial Sequence
  RNA for silencing
ugcccgcugccgcaaccac

SEQ ID NO: 50 - RNA, 19 nt, Artificial Sequence
  RNA for silencing
gcccgcugccgcaaccacg

SEQ ID NO: 51 - RNA, 19 nt, Artificial Sequence
  RNA for silencing
cccgcugccgcaaccacgg

SEQ ID NO: 52 - RNA, 19 nt, Artificial Sequence
  RNA for silencing
ccgcugccgcaaccacggc

SEQ ID NO: 53 - RNA, 19 nt, Artificial Sequence
  RNA for silencing
cgcugccgcaaccacggcu

SEQ ID NO: 54 - RNA, 19 nt, Artificial Sequence
  RNA for silencing
gcugccgcaaccacggcua

SEQ ID NO: 55 - RNA, 19 nt, Artificial Sequence
  RNA for silencing
cugccgcaaccacggcuac

SEQ ID NO: 56 - RNA, 19 nt, Artificial Sequence
  RNA for silencing
ugccgcaaccacggcuacu

SEQ ID NO: 57 - RNA, 19 nt, Artificial Sequence
  RNA for silencing
gccgcaaccacggcuacuc

SEQ ID NO: 58 - RNA, 19 nt, Artificial Sequence
  RNA for silencing
ccgcaaccacggcuacucc

SEQ ID NO: 59 - RNA, 19 nt, Artificial Sequence
  RNA for silencing
cgcaaccacggcuacuccu

SEQ ID NO: 60 - RNA, 19 nt, Artificial Sequence
  RNA for silencing
gcaaccacggcuacuccuc

SEQ ID NO: 61 - RNA, 19 nt, Artificial Sequence
  RNA for silencing
caaccacggcuacuccucg

SEQ ID NO: 62 - RNA, 19 nt, Artificial Sequence
  RNA for silencing
aaccacggcuacuccucgc

SEQ ID NO: 63 - RNA, 19 nt, Artificial Sequence
  RNA for silencing
accacggcuacuccucgcc

SEQ ID NO: 64 - RNA, 19 nt, Artificial Sequence
  RNA for silencing
ccacggcuacuccucgccg

SEQ ID NO: 65 - RNA, 19 nt, Artificial Sequence
  RNA for silencing
cacggcuacuccucgccgc

SEQ ID NO: 66 - RNA, 19 nt, Artificial Sequence
  RNA for silencing
acggcuacuccucgccgcu

SEQ ID NO: 67 - RNA, 19 nt, Artificial Sequence
  RNA for silencing
cggcuacuccucgccgcug

SEQ ID NO: 68 - RNA, 19 nt, Artificial Sequence
  RNA for silencing
ggcuacuccucgccgcuga

SEQ ID NO: 69 - RNA, 19 nt, Artificial Sequence
  RNA for silencing
gcuacuccucgccgcugaa

SEQ ID NO: 70 - RNA, 19 nt, Artificial Sequence
  RNA for silencing
cuacuccucgccgcugaag

SEQ ID NO: 71 - RNA, 19 nt, Artificial Sequence
  RNA for silencing
uacuccucgccgcugaagg

SEQ ID NO: 72 - RNA, 19 nt, Artificial Sequence
  RNA for silencing
acuccucgccgcugaaggg

SEQ ID NO: 73 - RNA, 19 nt, Artificial Sequence
  RNA for silencing
cuccucgccgcugaagggg

SEQ ID NO: 74 - RNA, 19 nt, Artificial Sequence
  RNA for silencing
uccucgccgcugaaggggc

SEQ ID NO: 75 - RNA, 19 nt, Artificial Sequence
  RNA for silencing
ccucgccgcugaaggggca

SEQ ID NO: 76 - RNA, 19 nt, Artificial Sequence
  RNA for silencing
cucgccgcugaaggggcac

SEQ ID NO: 77 - RNA, 19 nt, Artificial Sequence
  RNA for silencing
ucgccgcugaaggggcaca

SEQ ID NO: 78 - RNA, 19 nt, Artificial Sequence
  RNA for silencing
cgccgcugaaggggcacaa

SEQ ID NO: 79 - RNA, 19 nt, Artificial Sequence
  RNA for silencing
gccgcugaaggggcacaag

SEQ ID NO: 80 - RNA, 19 nt, Artificial Sequence
  RNA for silencing
ccgcugaaggggcacaagc

SEQ ID NO: 81 - RNA, 19 nt, Artificial Sequence
  RNA for silencing
cgcugaaggggcacaagcg

SEQ ID NO: 82 - RNA, 19 nt, Artificial Sequence
  RNA for silencing
gcugaaggggcacaagcgg

SEQ ID NO: 83 - RNA, 19 nt, Artificial Sequence
  RNA for silencing
cugaaggggcacaagcggu

SEQ ID NO: 84 - RNA, 19 nt, Artificial Sequence
  RNA for silencing
ugaaggggcacaagcgguu

SEQ ID NO: 85 - RNA, 19 nt, Artificial Sequence
  RNA for silencing
gaaggggcacaagcgguuc

SEQ ID NO: 86 - RNA, 19 nt, Artificial Sequence
  RNA for silencing
aaggggcacaagcgguucu

SEQ ID NO: 87 - RNA, 19 nt, Artificial Sequence
  RNA for silencing
aggggcacaagcgguucug

SEQ ID NO: 88 - RNA, 19 nt, Artificial Sequence
  RNA for silencing
ggggcacaagcgguucugc

SEQ ID NO: 89 - RNA, 19 nt, Artificial Sequence
  RNA for silencing
gggcacaagcgguucugca

SEQ ID NO: 90 - RNA, 19 nt, Artificial Sequence
  RNA for silencing
ggcacaagcgguucugcau

SEQ ID NO: 91 - RNA, 19 nt, Artificial Sequence
  RNA for silencing
gcacaagcgguucugcaug

SEQ ID NO: 92 - RNA, 19 nt, Artificial Sequence
  RNA for silencing
cacaagcgguucugcaugu

SEQ ID NO: 93 - RNA, 19 nt, Artificial Sequence
  RNA for silencing
acaagcgguucugcaugug

SEQ ID NO: 94 - RNA, 19 nt, Artificial Sequence
  RNA for silencing
caagcgguucugcaugugg

SEQ ID NO: 95 - RNA, 19 nt, Artificial Sequence
  RNA for silencing
aagcgguucugcauguggc

SEQ ID NO: 96 - RNA, 19 nt, Artificial Sequence
  RNA for silencing
agcgguucugcauguggcg

SEQ ID NO: 97 - RNA, 19 nt, Artificial Sequence
  RNA for silencing
gcgguucugcauguggcgg

SEQ ID NO: 98 - RNA, 19 nt, Artificial Sequence
  RNA for silencing
cgguucugcauguggcggg

SEQ ID NO: 99 - RNA, 19 nt, Artificial Sequence
  RNA for silencing
gguucugcauguggcggga

SEQ ID NO: 100 - RNA, 19 nt, Artificial Sequence
  RNA for silencing
guucugcauguggcgggac

SEQ ID NO: 101 - RNA, 19 nt, Artificial Sequence
  RNA for silencing
uucugcauguggcgggacu

SEQ ID NO: 102 - RNA, 19 nt, Artificial Sequence
  RNA for silencing
ucugcauguggcgggacug

SEQ ID NO: 103 - RNA, 19 nt, Artificial Sequence
  RNA for silencing
cugcauguggcgggacugc

SEQ ID NO: 104 - RNA, 19 nt, Artificial Sequence
  RNA for silencing
ugcauguggcgggacugcc

SEQ ID NO: 105 - RNA, 19 nt, Artificial Sequence
  RNA for silencing
gcauguggcgggacugcca

SEQ ID NO: 106 - RNA, 19 nt, Artificial Sequence
  RNA for silencing
cauguggcgggacugccag

SEQ ID NO: 107 - RNA, 19 nt, Artificial Sequence
  RNA for silencing
auguggcgggacugccagu

SEQ ID NO: 108 - RNA, 19 nt, Artificial Sequence
  RNA for silencing
uguggcgggacugccagug

SEQ ID NO: 109 - RNA, 19 nt, Artificial Sequence
  RNA for silencing
guggcgggacugccagugc

SEQ ID NO: 110 - RNA, 19 nt, Artificial Sequence
  RNA for silencing
uggcgggacugccagugca

SEQ ID NO: 111 - RNA, 19 nt, Artificial Sequence
  RNA for silencing
ggcgggacugccagugcaa

SEQ ID NO: 112 - RNA, 19 nt, Artificial Sequence
  RNA for silencing
gcgggacugccagugcaag

SEQ ID NO: 113 - RNA, 19 nt, Artificial Sequence
  RNA for silencing
cgggacugccagugcaaga

SEQ ID NO: 114 - RNA, 19 nt, Artificial Sequence
  RNA for silencing
gggacugccagugcaagaa

SEQ ID NO: 115 - RNA, 19 nt, Artificial Sequence
  RNA for silencing
ggacugccagugcaagaag

SEQ ID NO: 116 - RNA, 19 nt, Artificial Sequence
  RNA for silencing
gacugccagugcaagaagu

SEQ ID NO: 117 - RNA, 19 nt, Artificial Sequence
  RNA for silencing
acugccagugcaagaagug

SEQ ID NO: 118 - RNA, 19 nt, Artificial Sequence
  RNA for silencing
cugccagugcaagaagugc

SEQ ID NO: 119 - RNA, 19 nt, Artificial Sequence
  RNA for silencing
ugccagugcaagaagugca

SEQ ID NO: 120 - RNA, 19 nt, Artificial Sequence
  RNA for silencing
gccagugcaagaagugcag

SEQ ID NO: 121 - RNA, 19 nt, Artificial Sequence
  RNA for silencing
ccagugcaagaagugcagc

SEQ ID NO: 122 - RNA, 19 nt, Artificial Sequence
  RNA for silencing
cagugcaagaagugcagcc

SEQ ID NO: 123 - RNA, 19 nt, Artificial Sequence
  RNA for silencing
agugcaagaagugcagccu

SEQ ID NO: 124 - RNA, 19 nt, Artificial Sequence
  RNA for silencing
gugcaagaagugcagccug

SEQ ID NO: 125 - RNA, 19 nt, Artificial Sequence
  RNA for silencing
ugcaagaagugcagccuga

SEQ ID NO: 126 - RNA, 19 nt, Artificial Sequence
  RNA for silencing
gcaagaagugcagccugau

SEQ ID NO: 127 - RNA, 19 nt, Artificial Sequence
  RNA for silencing
caagaagugcagccugauc

SEQ ID NO: 128 - RNA, 19 nt, Artificial Sequence
  RNA for silencing
aagaagugcagccugaucg

SEQ ID NO: 129 - RNA, 19 nt, Artificial Sequence
  RNA for silencing
agaagugcagccugaucgc

SEQ ID NO: 130 - RNA, 19 nt, Artificial Sequence
  RNA for silencing
gaagugcagccugaucgcc

SEQ ID NO: 131 - RNA, 19 nt, Artificial Sequence
  RNA for silencing
aagugcagccugaucgccg

SEQ ID NO: 132 - RNA, 19 nt, Artificial Sequence
  RNA for silencing
agugcagccugaucgccga

SEQ ID NO: 133 - RNA, 19 nt, Artificial Sequence
  RNA for silencing
gugcagccugaucgccgag

SEQ ID NO: 134 - RNA, 19 nt, Artificial Sequence
  RNA for silencing
ugcagccugaucgccgagc

SEQ ID NO: 135 - RNA, 19 nt, Artificial Sequence
  RNA for silencing
gcagccugaucgccgagcg

SEQ ID NO: 136 - RNA, 19 nt, Artificial Sequence
  RNA for silencing
cagccugaucgccgagcgg

SEQ ID NO: 137 - RNA, 19 nt, Artificial Sequence
  RNA for silencing
agccugaucgccgagcggc

SEQ ID NO: 138 - RNA, 19 nt, Artificial Sequence
  RNA for silencing
gccugaucgccgagcggca

SEQ ID NO: 139 - RNA, 19 nt, Artificial Sequence
  RNA for silencing
ccugaucgccgagcggcag

SEQ ID NO: 140 - RNA, 19 nt, Artificial Sequence
  RNA for silencing
cugaucgccgagcggcagc

SEQ ID NO: 141 - RNA, 19 nt, Artificial Sequence
  RNA for silencing
ugaucgccgagcggcagcg

SEQ ID NO: 142 - RNA, 19 nt, Artificial Sequence
  RNA for silencing
gaucgccgagcggcagcgg

SEQ ID NO: 143 - RNA, 19 nt, Artificial Sequence
  RNA for silencing
aucgccgagcggcagcggg

SEQ ID NO: 144 - RNA, 19 nt, Artificial Sequence
  RNA for silencing
ucgccgagcggcagcgggu

SEQ ID NO: 145 - RNA, 19 nt, Artificial Sequence
  RNA for silencing
cgccgagcggcagcgggug

SEQ ID NO: 146 - RNA, 19 nt, Artificial Sequence
  RNA for silencing
gccgagcggcagcggguga

SEQ ID NO: 147 - RNA, 19 nt, Artificial Sequence
  RNA for silencing
ccgagcggcagcgggugau

SEQ ID NO: 148 - RNA, 19 nt, Artificial Sequence
  RNA for silencing
cgagcggcagcgggugaug

SEQ ID NO: 149 - RNA, 19 nt, Artificial Sequence
  RNA for silencing
gagcggcagcgggugaugg

SEQ ID NO: 150 - RNA, 19 nt, Artificial Sequence
  RNA for silencing
agcggcagcgggugauggc

SEQ ID NO: 151 - RNA, 19 nt, Artificial Sequence
  RNA for silencing
gcggcagcgggugauggcc

SEQ ID NO: 152 - RNA, 19 nt, Artificial Sequence
  RNA for silencing
cggcagcgggugauggccg

SEQ ID NO: 153 - RNA, 19 nt, Artificial Sequence
  RNA for silencing
ggcagcgggugauggccgu

SEQ ID NO: 154 - RNA, 19 nt, Artificial Sequence
  RNA for silencing
gcagcgggugauggccgug

SEQ ID NO: 155 - RNA, 19 nt, Artificial Sequence
  RNA for silencing
cagcgggugauggccgugc

SEQ ID NO: 156 - RNA, 19 nt, Artificial Sequence
  RNA for silencing
agcgggugauggccgugca

SEQ ID NO: 157 - RNA, 19 nt, Artificial Sequence
  RNA for silencing
gcgggugauggccgugcag

SEQ ID NO: 158 - RNA, 19 nt, Artificial Sequence
  RNA for silencing
cgggugauggccgugcagg

SEQ ID NO: 159 - RNA, 19 nt, Artificial Sequence
  RNA for silencing
gggugauggccgugcaggu

SEQ ID NO: 160 - RNA, 19 nt, Artificial Sequence
  RNA for silencing
ggugauggccgugcagguu

SEQ ID NO: 161 - RNA, 19 nt, Artificial Sequence
  RNA for silencing
gugauggccgugcagguug

SEQ ID NO: 162 - RNA, 19 nt, Artificial Sequence
  RNA for silencing
ugauggccgugcagguugc

SEQ ID NO: 163 - RNA, 19 nt, Artificial Sequence
  RNA for silencing
gauggccgugcagguugca

SEQ ID NO: 164 - RNA, 19 nt, Artificial Sequence
  RNA for silencing
auggccgugcagguugcac

SEQ ID NO: 165 - RNA, 19 nt, Artificial Sequence
  RNA for silencing
uggccgugcagguugcacu

SEQ ID NO: 166 - RNA, 19 nt, Artificial Sequence
  RNA for silencing
ggccgugcagguugcacug

SEQ ID NO: 167 - RNA, 19 nt, Artificial Sequence
  RNA for silencing
gccgugcagguugcacuga

SEQ ID NO: 168 - RNA, 19 nt, Artificial Sequence
  RNA for silencing
ccgugcagguugcacugag

SEQ ID NO: 169 - RNA, 19 nt, Artificial Sequence
  RNA for silencing
cgugcagguugcacugagg

SEQ ID NO: 170 - RNA, 19 nt, Artificial Sequence
  RNA for silencing
gugcagguugcacugagga

SEQ ID NO: 171 - RNA, 19 nt, Artificial Sequence
  RNA for silencing
ugcagguugcacugaggag

SEQ ID NO: 172 - RNA, 19 nt, Artificial Sequence
  RNA for silencing
gcagguugcacugaggagg

SEQ ID NO: 173 - RNA, 19 nt, Artificial Sequence
  RNA for silencing
cagguugcacugaggaggc

SEQ ID NO: 174 - RNA, 19 nt, Artificial Sequence
  RNA for silencing
agguugcacugaggaggca

SEQ ID NO: 175 - RNA, 19 nt, Artificial Sequence
  RNA for silencing
gguugcacugaggaggcag

SEQ ID NO: 176 - RNA, 19 nt, Artificial Sequence
  RNA for silencing
guugcacugaggaggcagc

SEQ ID NO: 177 - RNA, 19 nt, Artificial Sequence
  RNA for silencing
uugcacugaggaggcagca

SEQ ID NO: 178 - RNA, 19 nt, Artificial Sequence
  RNA for silencing
ugcacugaggaggcagcaa

SEQ ID NO: 179 - RNA, 19 nt, Artificial Sequence
  RNA for silencing
gcacugaggaggcagcaag

SEQ ID NO: 180 - RNA, 19 nt, Artificial Sequence
  RNA for silencing
cacugaggaggcagcaagc

SEQ ID NO: 181 - RNA, 19 nt, Artificial Sequence
  RNA for silencing
acugaggaggcagcaagcc

SEQ ID NO: 182 - RNA, 19 nt, Artificial Sequence
  RNA for silencing
cugaggaggcagcaagccc

SEQ ID NO: 183 - RNA, 19 nt, Artificial Sequence
  RNA for silencing
ugaggaggcagcaagccca

SEQ ID NO: 184 - RNA, 19 nt, Artificial Sequence
  RNA for silencing
gaggaggcagcaagcccag

SEQ ID NO: 185 - RNA, 19 nt, Artificial Sequence
  RNA for silencing
aggaggcagcaagcccagg

SEQ ID NO: 186 - RNA, 19 nt, Artificial Sequence
  RNA for silencing
ggaggcagcaagcccagga

SEQ ID NO: 187 - RNA, 19 nt, Artificial Sequence
  RNA for silencing
gaggcagcaagcccaggaa

SEQ ID NO: 188 - RNA, 19 nt, Artificial Sequence
  RNA for silencing
aggcagcaagcccaggaag

SEQ ID NO: 189 - RNA, 19 nt, Artificial Sequence
  RNA for silencing
ggcagcaagcccaggaaga

SEQ ID NO: 190 - RNA, 19 nt, Artificial Sequence
  RNA for silencing
gcagcaagcccaggaagag

SEQ ID NO: 191 - RNA, 19 nt, Artificial Sequence
  RNA for silencing
cagcaagcccaggaagagg

SEQ ID NO: 192 - RNA, 19 nt, Artificial Sequence
  RNA for silencing
agcaagcccaggaagagga

SEQ ID NO: 193 - RNA, 19 nt, Artificial Sequence
  RNA for silencing
gcaagcccaggaagaggag

SEQ ID NO: 194 - RNA, 19 nt, Artificial Sequence
  RNA for silencing
caagcccaggaagaggagc

SEQ ID NO: 195 - RNA, 19 nt, Artificial Sequence
  RNA for silencing
aagcccaggaagaggagcu

SEQ ID NO: 196 - RNA, 19 nt, Artificial Sequence
  RNA for silencing
agcccaggaagaggagcug

SEQ ID NO: 197 - RNA, 19 nt, Artificial Sequence
  RNA for silencing
gcccaggaagaggagcugg

SEQ ID NO: 198 - RNA, 19 nt, Artificial Sequence
  RNA for silencing
cccaggaagaggagcuggg

SEQ ID NO: 199 - RNA, 19 nt, Artificial Sequence
  RNA for silencing
ccaggaagaggagcugggg

SEQ ID NO: 200 - RNA, 19 nt, Artificial Sequence
  RNA for silencing
caggaagaggagcugggga

SEQ ID NO: 201 - RNA, 19 nt, Artificial Sequence
  RNA for silencing
aggaagaggagcuggggau

SEQ ID NO: 202 - RNA, 19 nt, Artificial Sequence
  RNA for silencing
ggaagaggagcuggggauc

SEQ ID NO: 203 - RNA, 19 nt, Artificial Sequence
  RNA for silencing
gaagaggagcuggggauca

SEQ ID NO: 204 - RNA, 19 nt, Artificial Sequence
  RNA for silencing
aagaggagcuggggaucag

SEQ ID NO: 205 - RNA, 19 nt, Artificial Sequence
  RNA for silencing
agaggagcuggggaucagc

SEQ ID NO: 206 - RNA, 19 nt, Artificial Sequence
  RNA for silencing
gaggagcuggggaucagcc

SEQ ID NO: 207 - RNA, 19 nt, Artificial Sequence
  RNA for silencing
aggagcuggggaucagcca

SEQ ID NO: 208 - RNA, 19 nt, Artificial Sequence
  RNA for silencing
ggagcuggggaucagccac

SEQ ID NO: 209 - RNA, 19 nt, Artificial Sequence
  RNA for silencing
gagcuggggaucagccacc

SEQ ID NO: 210 - RNA, 19 nt, Artificial Sequence
  RNA for silencing
agcuggggaucagccaccc

SEQ ID NO: 211 - RNA, 19 nt, Artificial Sequence
  RNA for silencing
gcuggggaucagccacccu

SEQ ID NO: 212 - RNA, 19 nt, Artificial Sequence
  RNA for silencing
cuggggaucagccacccug

SEQ ID NO: 213 - RNA, 19 nt, Artificial Sequence
  RNA for silencing
uggggaucagccacccugu

SEQ ID NO: 214 - RNA, 19 nt, Artificial Sequence
  RNA for silencing
ggggaucagccacccugua

SEQ ID NO: 215 - RNA, 19 nt, Artificial Sequence
  RNA for silencing
gggaucagccacccuguac

SEQ ID NO: 216 - RNA, 19 nt, Artificial Sequence
  RNA for silencing
ggaucagccacccuguacc

SEQ ID NO: 217 - RNA, 19 nt, Artificial Sequence
  RNA for silencing
gaucagccacccuguaccc

SEQ ID NO: 218 - RNA, 19 nt, Artificial Sequence
  RNA for silencing
aucagccacccuguacccc

SEQ ID NO: 219 - RNA, 19 nt, Artificial Sequence
  RNA for silencing
ucagccacccuguaccccu

SEQ ID NO: 220 - RNA, 19 nt, Artificial Sequence
  RNA for silencing
cagccacccuguaccccug

SEQ ID NO: 221 - RNA, 19 nt, Artificial Sequence
  RNA for silencing
agccacccuguaccccugc

SEQ ID NO: 222 - RNA, 19 nt, Artificial Sequence
  RNA for silencing
gccacccuguaccccugcc

SEQ ID NO: 223 - RNA, 19 nt, Artificial Sequence
  RNA for silencing
ccacccuguaccccugccc

SEQ ID NO: 224 - RNA, 19 nt, Artificial Sequence
  RNA for silencing
cacccuguaccccugccca

SEQ ID NO: 225 - RNA, 19 nt, Artificial Sequence
  RNA for silencing
acccuguaccccugcccag

SEQ ID NO: 226 - RNA, 19 nt, Artificial Sequence
  RNA for silencing
cccuguaccccugcccagu

SEQ ID NO: 227 - RNA, 19 nt, Artificial Sequence
  RNA for silencing
ccuguaccccugcccagug

SEQ ID NO: 228 - RNA, 19 nt, Artificial Sequence
  RNA for silencing
cuguaccccugcccagugc

SEQ ID NO: 229 - RNA, 19 nt, Artificial Sequence
  RNA for silencing
uguaccccugcccagugcc

SEQ ID NO: 230 - RNA, 19 nt, Artificial Sequence
  RNA for silencing
guaccccugcccagugccc

SEQ ID NO: 231 - RNA, 19 nt, Artificial Sequence
  RNA for silencing
uaccccugcccagugcccc

SEQ ID NO: 232 - RNA, 19 nt, Artificial Sequence
  RNA for silencing
accccugcccagugccccu

SEQ ID NO: 233 - RNA, 19 nt, Artificial Sequence
  RNA for silencing
ccccugcccagugccccug

SEQ ID NO: 234 - RNA, 19 nt, Artificial Sequence
  RNA for silencing
cccugcccagugccccuga

SEQ ID NO: 235 - RNA, 19 nt, Artificial Sequence
  RNA for silencing
ccugcccagugccccugag

SEQ ID NO: 236 - RNA, 19 nt, Artificial Sequence
  RNA for silencing
cugcccagugccccugagc

SEQ ID NO: 237 - RNA, 19 nt, Artificial Sequence
  RNA for silencing
ugcccagugccccugagcc

SEQ ID NO: 238 - RNA, 19 nt, Artificial Sequence
  RNA for silencing
gcccagugccccugagcca

SEQ ID NO: 239 - RNA, 19 nt, Artificial Sequence
  RNA for silencing
cccagugccccugagccag

SEQ ID NO: 240 - RNA, 19 nt, Artificial Sequence
  RNA for silencing
ccagugccccugagccagu

SEQ ID NO: 241 - RNA, 19 nt, Artificial Sequence
  RNA for silencing
cagugccccugagccaguu

SEQ ID NO: 242 - RNA, 19 nt, Artificial Sequence
  RNA for silencing
agugccccugagccaguug

SEQ ID NO: 243 - RNA, 19 nt, Artificial Sequence
  RNA for silencing
gugccccugagccaguugu

SEQ ID NO: 244 - RNA, 19 nt, Artificial Sequence
  RNA for silencing
ugccccugagccaguuguc

SEQ ID NO: 245 - RNA, 19 nt, Artificial Sequence
  RNA for silencing
gccccugagccaguuguca

SEQ ID NO: 246 - RNA, 19 nt, Artificial Sequence
  RNA for silencing
ccccugagccaguugucaa

SEQ ID NO: 247 - RNA, 19 nt, Artificial Sequence
  RNA for silencing
cccugagccaguugucaag

SEQ ID NO: 248 - RNA, 19 nt, Artificial Sequence
  RNA for silencing
ccugagccaguugucaaga

SEQ ID NO: 249 - RNA, 19 nt, Artificial Sequence
  RNA for silencing
cugagccaguugucaagaa

SEQ ID NO: 250 - RNA, 19 nt, Artificial Sequence
  RNA for silencing
ugagccaguugucaagaag

SEQ ID NO: 251 - RNA, 19 nt, Artificial Sequence
  RNA for silencing
gagccaguugucaagaaga

SEQ ID NO: 252 - RNA, 19 nt, Artificial Sequence
  RNA for silencing
agccaguugucaagaagag

SEQ ID NO: 253 - RNA, 19 nt, Artificial Sequence
  RNA for silencing
gccaguugucaagaagagc

SEQ ID NO: 254 - RNA, 19 nt, Artificial Sequence
  RNA for silencing
ccaguugucaagaagagca

SEQ ID NO: 255 - RNA, 19 nt, Artificial Sequence
  RNA for silencing
caguugucaagaagagcag

SEQ ID NO: 256 - RNA, 19 nt, Artificial Sequence
  RNA for silencing
aguugucaagaagagcagc

SEQ ID NO: 257 - RNA, 19 nt, Artificial Sequence
  RNA for silencing
guugucaagaagagcagca

SEQ ID NO: 258 - RNA, 19 nt, Artificial Sequence
  RNA for silencing
uugucaagaagagcagcag

SEQ ID NO: 259 - RNA, 19 nt, Artificial Sequence
  RNA for silencing
ugucaagaagagcagcagc

SEQ ID NO: 260 - RNA, 19 nt, Artificial Sequence
  RNA for silencing
gucaagaagagcagcagca

SEQ ID NO: 261 - RNA, 19 nt, Artificial Sequence
  RNA for silencing
ucaagaagagcagcagcag

SEQ ID NO: 262 - RNA, 19 nt, Artificial Sequence
  RNA for silencing
caagaagagcagcagcagc

SEQ ID NO: 263 - RNA, 19 nt, Artificial Sequence
  RNA for silencing
aagaagagcagcagcagca

SEQ ID NO: 264 - RNA, 19 nt, Artificial Sequence
  RNA for silencing
agaagagcagcagcagcag

SEQ ID NO: 265 - RNA, 19 nt, Artificial Sequence
  RNA for silencing
gaagagcagcagcagcagc

SEQ ID NO: 266 - RNA, 19 nt, Artificial Sequence
  RNA for silencing
aagagcagcagcagcagcu

SEQ ID NO: 267 - RNA, 19 nt, Artificial Sequence
  RNA for silencing
agagcagcagcagcagcuc

SEQ ID NO: 268 - RNA, 19 nt, Artificial Sequence
  RNA for silencing
gagcagcagcagcagcucc

SEQ ID NO: 269 - RNA, 19 nt, Artificial Sequence
  RNA for silencing
agcagcagcagcagcuccu

SEQ ID NO: 270 - RNA, 19 nt, Artificial Sequence
  RNA for silencing
gcagcagcagcagcuccug

SEQ ID NO: 271 - RNA, 19 nt, Artificial Sequence
  RNA for silencing
cagcagcagcagcuccugu

SEQ ID NO: 272 - RNA, 19 nt, Artificial Sequence
  RNA for silencing
agcagcagcagcuccuguc

SEQ ID NO: 273 - RNA, 19 nt, Artificial Sequence
  RNA for silencing
gcagcagcagcuccugucu

SEQ ID NO: 274 - RNA, 19 nt, Artificial Sequence
  RNA for silencing
cagcagcagcuccugucuc

SEQ ID NO: 275 - RNA, 19 nt, Artificial Sequence
  RNA for silencing
agcagcagcuccugucucc

SEQ ID NO: 276 - RNA, 19 nt, Artificial Sequence
  RNA for silencing
gcagcagcuccugucuccu

SEQ ID NO: 277 - RNA, 19 nt, Artificial Sequence
  RNA for silencing
cagcagcuccugucuccug

SEQ ID NO: 278 - RNA, 19 nt, Artificial Sequence
  RNA for silencing
agcagcuccugucuccugc

SEQ ID NO: 279 - RNA, 19 nt, Artificial Sequence
  RNA for silencing
gcagcuccugucuccugca

SEQ ID NO: 280 - RNA, 19 nt, Artificial Sequence
  RNA for silencing
cagcuccugucuccugcag

SEQ ID NO: 281 - RNA, 19 nt, Artificial Sequence
  RNA for silencing
agcuccugucuccugcagg

SEQ ID NO: 282 - RNA, 19 nt, Artificial Sequence
  RNA for silencing
gcuccugucuccugcagga

SEQ ID NO: 283 - RNA, 19 nt, Artificial Sequence
  RNA for silencing
cuccugucuccugcaggac

SEQ ID NO: 284 - RNA, 19 nt, Artificial Sequence
  RNA for silencing
uccugucuccugcaggaca

SEQ ID NO: 285 - RNA, 19 nt, Artificial Sequence
  RNA for silencing
ccugucuccugcaggacag

SEQ ID NO: 286 - RNA, 19 nt, Artificial Sequence
  RNA for silencing
cugucuccugcaggacagc

SEQ ID NO: 287 - RNA, 19 nt, Artificial Sequence
  RNA for silencing
ugucuccugcaggacagca

SEQ ID NO: 288 - RNA, 19 nt, Artificial Sequence
  RNA for silencing
gucuccugcaggacagcag

SEQ ID NO: 289 - RNA, 19 nt, Artificial Sequence
  RNA for silencing
ucuccugcaggacagcagc

SEQ ID NO: 290 - RNA, 19 nt, Artificial Sequence
  RNA for silencing
cuccugcaggacagcagca

SEQ ID NO: 291 - RNA, 19 nt, Artificial Sequence
  RNA for silencing
uccugcaggacagcagcag

SEQ ID NO: 292 - RNA, 19 nt, Artificial Sequence
  RNA for silencing
ccugcaggacagcagcagc

SEQ ID NO: 293 - RNA, 19 nt, Artificial Sequence
  RNA for silencing
cugcaggacagcagcagcc

SEQ ID NO: 294 - RNA, 19 nt, Artificial Sequence
  RNA for silencing
ugcaggacagcagcagccc

SEQ ID NO: 295 - RNA, 19 nt, Artificial Sequence
  RNA for silencing
gcaggacagcagcagcccu

SEQ ID NO: 296 - RNA, 19 nt, Artificial Sequence
  RNA for silencing
caggacagcagcagcccug

SEQ ID NO: 297 - RNA, 19 nt, Artificial Sequence
  RNA for silencing
aggacagcagcagcccugc

SEQ ID NO: 298 - RNA, 19 nt, Artificial Sequence
  RNA for silencing
ggacagcagcagcccugcu

SEQ ID NO: 299 - RNA, 19 nt, Artificial Sequence
  RNA for silencing
gacagcagcagcccugcuc

SEQ ID NO: 300 - RNA, 19 nt, Artificial Sequence
  RNA for silencing
acagcagcagcccugcuca

SEQ ID NO: 301 - RNA, 19 nt, Artificial Sequence
  RNA for silencing
cagcagcagcccugcucac

SEQ ID NO: 302 - RNA, 19 nt, Artificial Sequence
  RNA for silencing
agcagcagcccugcucacu

SEQ ID NO: 303 - RNA, 19 nt, Artificial Sequence
  RNA for silencing
gcagcagcccugcucacuc

SEQ ID NO: 304 - RNA, 19 nt, Artificial Sequence
  RNA for silencing
cagcagcccugcucacucc

SEQ ID NO: 305 - RNA, 19 nt, Artificial Sequence
  RNA for silencing
agcagcccugcucacucca

SEQ ID NO: 306 - RNA, 19 nt, Artificial Sequence
  RNA for silencing
gcagcccugcucacuccac

SEQ ID NO: 307 - RNA, 19 nt, Artificial Sequence
  RNA for silencing
cagcccugcucacuccacg

SEQ ID NO: 308 - RNA, 19 nt, Artificial Sequence
  RNA for silencing
agcccugcucacuccacga

SEQ ID NO: 309 - RNA, 19 nt, Artificial Sequence
  RNA for silencing
gcccugcucacuccacgag

SEQ ID NO: 310 - RNA, 19 nt, Artificial Sequence
  RNA for silencing
cccugcucacuccacgagc

SEQ ID NO: 311 - RNA, 19 nt, Artificial Sequence
  RNA for silencing
ccugcucacuccacgagca

SEQ ID NO: 312 - RNA, 19 nt, Artificial Sequence
  RNA for silencing
cugcucacuccacgagcac

SEQ ID NO: 313 - RNA, 19 nt, Artificial Sequence
  RNA for silencing
ugcucacuccacgagcacg

SEQ ID NO: 314 - RNA, 19 nt, Artificial Sequence
  RNA for silencing
gcucacuccacgagcacgg

SEQ ID NO: 315 - RNA, 19 nt, Artificial Sequence
  RNA for silencing
cucacuccacgagcacggu

SEQ ID NO: 316 - RNA, 19 nt, Artificial Sequence
  RNA for silencing
ucacuccacgagcacggug

SEQ ID NO: 317 - RNA, 19 nt, Artificial Sequence
  RNA for silencing
cacuccacgagcacggugg

SEQ ID NO: 318 - RNA, 19 nt, Artificial Sequence
  RNA for silencing
acuccacgagcacgguggc

SEQ ID NO: 319 - RNA, 19 nt, Artificial Sequence
  RNA for silencing
cuccacgagcacgguggca

SEQ ID NO: 320 - RNA, 19 nt, Artificial Sequence
  RNA for silencing
uccacgagcacgguggcag

SEQ ID NO: 321 - RNA, 19 nt, Artificial Sequence
  RNA for silencing
ccacgagcacgguggcagc

SEQ ID NO: 322 - RNA, 19 nt, Artificial Sequence
  RNA for silencing
cacgagcacgguggcagca

SEQ ID NO: 323 - RNA, 19 nt, Artificial Sequence
  RNA for silencing
acgagcacgguggcagcag

SEQ ID NO: 324 - RNA, 19 nt, Artificial Sequence
  RNA for silencing
cgagcacgguggcagcagc

SEQ ID NO: 325 - RNA, 19 nt, Artificial Sequence
  RNA for silencing
gagcacgguggcagcagca

SEQ ID NO: 326 - RNA, 19 nt, Artificial Sequence
  RNA for silencing
agcacgguggcagcagcag

SEQ ID NO: 327 - RNA, 19 nt, Artificial Sequence
  RNA for silencing
gcacgguggcagcagcagc

SEQ ID NO: 328 - RNA, 19 nt, Artificial Sequence
  RNA for silencing
cacgguggcagcagcagca

SEQ ID NO: 329 - RNA, 19 nt, Artificial Sequence
  RNA for silencing
acgguggcagcagcagcag

SEQ ID NO: 330 - RNA, 19 nt, Artificial Sequence
  RNA for silencing
cgguggcagcagcagcagc

SEQ ID NO: 331 - RNA, 19 nt, Artificial Sequence
  RNA for silencing
gguggcagcagcagcagcg

SEQ ID NO: 332 - RNA, 19 nt, Artificial Sequence
  RNA for silencing
guggcagcagcagcagcga

SEQ ID NO: 333 - RNA, 19 nt, Artificial Sequence
  RNA for silencing
uggcagcagcagcagcgag

SEQ ID NO: 334 - RNA, 19 nt, Artificial Sequence
  RNA for silencing
ggcagcagcagcagcgagc

SEQ ID NO: 335 - RNA, 19 nt, Artificial Sequence
  RNA for silencing
gcagcagcagcagcgagcg

SEQ ID NO: 336 - RNA, 19 nt, Artificial Sequence
  RNA for silencing
cagcagcagcagcgagcgc

SEQ ID NO: 337 - RNA, 19 nt, Artificial Sequence
  RNA for silencing
agcagcagcagcgagcgca

SEQ ID NO: 338 - RNA, 19 nt, Artificial Sequence
  RNA for silencing
gcagcagcagcgagcgcac

SEQ ID NO: 339 - RNA, 19 nt, Artificial Sequence
  RNA for silencing
cagcagcagcgagcgcacc

SEQ ID NO: 340 - RNA, 19 nt, Artificial Sequence
  RNA for silencing
agcagcagcgagcgcacca

SEQ ID NO: 341 - RNA, 19 nt, Artificial Sequence
  RNA for silencing
gcagcagcgagcgcaccac

SEQ ID NO: 342 - RNA, 19 nt, Artificial Sequence
  RNA for silencing
cagcagcgagcgcaccacc

SEQ ID NO: 343 - RNA, 19 nt, Artificial Sequence
  RNA for silencing
agcagcgagcgcaccacca

SEQ ID NO: 344 - RNA, 19 nt, Artificial Sequence
  RNA for silencing
gcagcgagcgcaccaccag

SEQ ID NO: 345 - RNA, 19 nt, Artificial Sequence
  RNA for silencing
cagcgagcgcaccaccaga

SEQ ID NO: 346 - RNA, 19 nt, Artificial Sequence
  RNA for silencing
agcgagcgcaccaccagag

SEQ ID NO: 347 - RNA, 19 nt, Artificial Sequence
  RNA for silencing
gcgagcgcaccaccagagg

SEQ ID NO: 348 - RNA, 19 nt, Artificial Sequence
  RNA for silencing
cgagcgcaccaccagaggg

SEQ ID NO: 349 - RNA, 19 nt, Artificial Sequence
  RNA for silencing
gagcgcaccaccagaggga

SEQ ID NO: 350 - RNA, 19 nt, Artificial Sequence
  RNA for silencing
agcgcaccaccagagggac

SEQ ID NO: 351 - RNA, 19 nt, Artificial Sequence
  RNA for silencing
gcgcaccaccagagggacg

SEQ ID NO: 352 - RNA, 19 nt, Artificial Sequence
  RNA for silencing
cgcaccaccagagggacgg

SEQ ID NO: 353 - RNA, 19 nt, Artificial Sequence
  RNA for silencing
gcaccaccagagggacgga

SEQ ID NO: 354 - RNA, 19 nt, Artificial Sequence
  RNA for silencing
caccaccagagggacggau

SEQ ID NO: 355 - RNA, 19 nt, Artificial Sequence
  RNA for silencing
accaccagagggacggaug

SEQ ID NO: 356 - RNA, 19 nt, Artificial Sequence
  RNA for silencing
ccaccagagggacggaugc

SEQ ID NO: 357 - RNA, 19 nt, Artificial Sequence
  RNA for silencing
caccagagggacggaugcu

SEQ ID NO: 358 - RNA, 19 nt, Artificial Sequence
  RNA for silencing
accagagggacggaugcuc

SEQ ID NO: 359 - RNA, 19 nt, Artificial Sequence
  RNA for silencing
ccagagggacggaugcuca

SEQ ID NO: 360 - RNA, 19 nt, Artificial Sequence
  RNA for silencing
cagagggacggaugcucau

SEQ ID NO: 361 - RNA, 19 nt, Artificial Sequence
  RNA for silencing
agagggacggaugcucauu

SEQ ID NO: 362 - RNA, 19 nt, Artificial Sequence
  RNA for silencing
gagggacggaugcucauuc

SEQ ID NO: 363 - RNA, 19 nt, Artificial Sequence
  RNA for silencing
agggacggaugcucauuca

SEQ ID NO: 364 - RNA, 19 nt, Artificial Sequence
  RNA for silencing
gggacggaugcucauucag

SEQ ID NO: 365 - RNA, 19 nt, Artificial Sequence
  RNA for silencing
ggacggaugcucauucagg

SEQ ID NO: 366 - RNA, 19 nt, Artificial Sequence
  RNA for silencing
gacggaugcucauucagga

SEQ ID NO: 367 - RNA, 19 nt, Artificial Sequence
  RNA for silencing
acggaugcucauucaggac

SEQ ID NO: 368 - RNA, 19 nt, Artificial Sequence
  RNA for silencing
cggaugcucauucaggaca

SEQ ID NO: 369 - RNA, 19 nt, Artificial Sequence
  RNA for silencing
ggaugcucauucaggacau

SEQ ID NO: 370 - RNA, 19 nt, Artificial Sequence
  RNA for silencing
gaugcucauucaggacauc

SEQ ID NO: 371 - RNA, 19 nt, Artificial Sequence
  RNA for silencing
augcucauucaggacaucc

SEQ ID NO: 372 - RNA, 19 nt, Artificial Sequence
  RNA for silencing
ugcucauucaggacauccc

SEQ ID NO: 373 - RNA, 19 nt, Artificial Sequence
  RNA for silencing
gcucauucaggacaucccu

SEQ ID NO: 374 - RNA, 19 nt, Artificial Sequence
  RNA for silencing
cucauucaggacaucccuu

SEQ ID NO: 375 - RNA, 19 nt, Artificial Sequence
  RNA for silencing
ucauucaggacaucccuuc

SEQ ID NO: 376 - RNA, 19 nt, Artificial Sequence
  RNA for silencing
cauucaggacaucccuucc

SEQ ID NO: 377 - RNA, 19 nt, Artificial Sequence
  RNA for silencing
auucaggacaucccuucca

SEQ ID NO: 378 - RNA, 19 nt, Artificial Sequence
  RNA for silencing
uucaggacaucccuuccau

SEQ ID NO: 379 - RNA, 19 nt, Artificial Sequence
  RNA for silencing
ucaggacaucccuuccauc

SEQ ID NO: 380 - RNA, 19 nt, Artificial Sequence
  RNA for silencing
caggacaucccuuccaucc

SEQ ID NO: 381 - RNA, 19 nt, Artificial Sequence
  RNA for silencing
aggacaucccuuccauccc

SEQ ID NO: 382 - RNA, 19 nt, Artificial Sequence
  RNA for silencing
ggacaucccuuccaucccc

SEQ ID NO: 383 - RNA, 19 nt, Artificial Sequence
  RNA for silencing
gacaucccuuccaucccca

SEQ ID NO: 384 - RNA, 19 nt, Artificial Sequence
  RNA for silencing
acaucccuuccauccccag

SEQ ID NO: 385 - RNA, 19 nt, Artificial Sequence
  RNA for silencing
caucccuuccauccccagc

SEQ ID NO: 386 - RNA, 19 nt, Artificial Sequence
  RNA for silencing
aucccuuccauccccagca

SEQ ID NO: 387 - RNA, 19 nt, Artificial Sequence
  RNA for silencing
ucccuuccauccccagcag

SEQ ID NO: 388 - RNA, 19 nt, Artificial Sequence
  RNA for silencing
cccuuccauccccagcaga

SEQ ID NO: 389 - RNA, 19 nt, Artificial Sequence
  RNA for silencing
ccuuccauccccagcagag

SEQ ID NO: 390 - RNA, 19 nt, Artificial Sequence
  RNA for silencing
cuuccauccccagcagagg

SEQ ID NO: 391 - RNA, 19 nt, Artificial Sequence
  RNA for silencing
uuccauccccagcagaggg

SEQ ID NO: 392 - RNA, 19 nt, Artificial Sequence
  RNA for silencing
uccauccccagcagagggc

SEQ ID NO: 393 - RNA, 19 nt, Artificial Sequence
  RNA for silencing
ccauccccagcagagggca

SEQ ID NO: 394 - RNA, 19 nt, Artificial Sequence
  RNA for silencing
cauccccagcagagggcac

SEQ ID NO: 395 - RNA, 19 nt, Artificial Sequence
  RNA for silencing
auccccagcagagggcacu

SEQ ID NO: 396 - RNA, 19 nt, Artificial Sequence
  RNA for silencing
uccccagcagagggcacuu

SEQ ID NO: 397 - RNA, 19 nt, Artificial Sequence
  RNA for silencing
ccccagcagagggcacuug

SEQ ID NO: 398 - RNA, 19 nt, Artificial Sequence
  RNA for silencing
cccagcagagggcacuugg

SEQ ID NO: 399 - RNA, 19 nt, Artificial Sequence
  RNA for silencing
ccagcagagggcacuugga

SEQ ID NO: 400 - RNA, 19 nt, Artificial Sequence
  RNA for silencing
cagcagagggcacuuggag

SEQ ID NO: 401 - RNA, 19 nt, Artificial Sequence
  RNA for silencing
agcagagggcacuuggaga

SEQ ID NO: 402 - RNA, 19 nt, Artificial Sequence
  RNA for silencing
gcagagggcacuuggagag

SEQ ID NO: 403 - RNA, 19 nt, Artificial Sequence
  RNA for silencing
cagagggcacuuggagagc

SEQ ID NO: 404 - RNA, 19 nt, Artificial Sequence
  RNA for silencing
agagggcacuuggagagca

SEQ ID NO: 405 - RNA, 19 nt, Artificial Sequence
  RNA for silencing
gagggcacuuggagagcac

SEQ ID NO: 406 - RNA, 19 nt, Artificial Sequence
  RNA for silencing
agggcacuuggagagcacg

SEQ ID NO: 407 - RNA, 19 nt, Artificial Sequence
  RNA for silencing
gggcacuuggagagcacgu

SEQ ID NO: 408 - RNA, 19 nt, Artificial Sequence
  RNA for silencing
ggcacuuggagagcacguc

SEQ ID NO: 409 - RNA, 19 nt, Artificial Sequence
  RNA for silencing
gcacuuggagagcacgucu

SEQ ID NO: 410 - RNA, 19 nt, Artificial Sequence
  RNA for silencing
cacuuggagagcacgucug

SEQ ID NO: 411 - RNA, 19 nt, Artificial Sequence
  RNA for silencing
acuuggagagcacgucuga

SEQ ID NO: 412 - RNA, 19 nt, Artificial Sequence
  RNA for silencing
cuuggagagcacgucugau

SEQ ID NO: 413 - RNA, 19 nt, Artificial Sequence
  RNA for silencing
uuggagagcacgucugauu

SEQ ID NO: 414 - RNA, 19 nt, Artificial Sequence
  RNA for silencing
uggagagcacgucugauuu

SEQ ID NO: 415 - RNA, 19 nt, Artificial Sequence
  RNA for silencing
ggagagcacgucugauuug

SEQ ID NO: 416 - RNA, 19 nt, Artificial Sequence
  RNA for silencing
gagagcacgucugauuugg

SEQ ID NO: 417 - RNA, 19 nt, Artificial Sequence
  RNA for silencing
agagcacgucugauuuggu

SEQ ID NO: 418 - RNA, 19 nt, Artificial Sequence
  RNA for silencing
gagcacgucugauuugguu

SEQ ID NO: 419 - RNA, 19 nt, Artificial Sequence
  RNA for silencing
agcacgucugauuugguug

SEQ ID NO: 420 - RNA, 19 nt, Artificial Sequence
  RNA for silencing
gcacgucugauuugguugu

SEQ ID NO: 421 - RNA, 19 nt, Artificial Sequence
  RNA for silencing
cacgucugauuugguugug

SEQ ID NO: 422 - RNA, 19 nt, Artificial Sequence
  RNA for silencing
acgucugauuugguugugg

SEQ ID NO: 423 - RNA, 19 nt, Artificial Sequence
  RNA for silencing
cgucugauuugguugugga

SEQ ID NO: 424 - RNA, 19 nt, Artificial Sequence
  RNA for silencing
gucugauuugguuguggac

SEQ ID NO: 425 - RNA, 19 nt, Artificial Sequence
  RNA for silencing
ucugauuugguuguggacu

SEQ ID NO: 426 - RNA, 19 nt, Artificial Sequence
  RNA for silencing
cugauuugguuguggacuc

SEQ ID NO: 427 - RNA, 19 nt, Artificial Sequence
  RNA for silencing
ugauuugguuguggacucc

SEQ ID NO: 428 - RNA, 19 nt, Artificial Sequence
  RNA for silencing
gauuugguuguggacucca

SEQ ID NO: 429 - RNA, 19 nt, Artificial Sequence
  RNA for silencing
auuugguuguggacuccac

SEQ ID NO: 430 - RNA, 19 nt, Artificial Sequence
  RNA for silencing
uuugguuguggacuccacc

SEQ ID NO: 431 - RNA, 19 nt, Artificial Sequence
  RNA for silencing
uugguuguggacuccaccu

SEQ ID NO: 432 - RNA, 19 nt, Artificial Sequence
  RNA for silencing
ugguuguggacuccaccua

SEQ ID NO: 433 - RNA, 19 nt, Artificial Sequence
  RNA for silencing
gguuguggacuccaccuac

SEQ ID NO: 434 - RNA, 19 nt, Artificial Sequence
  RNA for silencing
guuguggacuccaccuacu

SEQ ID NO: 435 - RNA, 19 nt, Artificial Sequence
  RNA for silencing
uuguggacuccaccuacua

SEQ ID NO: 436 - RNA, 19 nt, Artificial Sequence
  RNA for silencing
uguggacuccaccuacuac

SEQ ID NO: 437 - RNA, 19 nt, Artificial Sequence
  RNA for silencing
guggacuccaccuacuaca

SEQ ID NO: 438 - RNA, 19 nt, Artificial Sequence
  RNA for silencing
uggacuccaccuacuacag

SEQ ID NO: 439 - RNA, 19 nt, Artificial Sequence
  RNA for silencing
ggacuccaccuacuacagc

SEQ ID NO: 440 - RNA, 19 nt, Artificial Sequence
  RNA for silencing
gacuccaccuacuacagca

SEQ ID NO: 441 - RNA, 19 nt, Artificial Sequence
  RNA for silencing
acuccaccuacuacagcag

SEQ ID NO: 442 - RNA, 19 nt, Artificial Sequence
  RNA for silencing
cuccaccuacuacagcagu

SEQ ID NO: 443 - RNA, 19 nt, Artificial Sequence
  RNA for silencing
uccaccuacuacagcaguu

SEQ ID NO: 444 - RNA, 19 nt, Artificial Sequence
  RNA for silencing
ccaccuacuacagcaguuu

SEQ ID NO: 445 - RNA, 19 nt, Artificial Sequence
  RNA for silencing
caccuacuacagcaguuuu

SEQ ID NO: 446 - RNA, 19 nt, Artificial Sequence
  RNA for silencing
accuacuacagcaguuuuu

SEQ ID NO: 447 - RNA, 19 nt, Artificial Sequence
  RNA for silencing
ccuacuacagcaguuuuua

SEQ ID NO: 448 - RNA, 19 nt, Artificial Sequence
  RNA for silencing
cuacuacagcaguuuuuac

SEQ ID NO: 449 - RNA, 19 nt, Artificial Sequence
  RNA for silencing
uacuacagcaguuuuuacc

SEQ ID NO: 450 - RNA, 19 nt, Artificial Sequence
  RNA for silencing
acuacagcaguuuuuacca

SEQ ID NO: 451 - RNA, 19 nt, Artificial Sequence
  RNA for silencing
cuacagcaguuuuuaccag

SEQ ID NO: 452 - RNA, 19 nt, Artificial Sequence
  RNA for silencing
uacagcaguuuuuaccagc

SEQ ID NO: 453 - RNA, 19 nt, Artificial Sequence
  RNA for silencing
acagcaguuuuuaccagcc

SEQ ID NO: 454 - RNA, 19 nt, Artificial Sequence
  RNA for silencing
cagcaguuuuuaccagcca

SEQ ID NO: 455 - RNA, 19 nt, Artificial Sequence
  RNA for silencing
agcaguuuuuaccagccau

SEQ ID NO: 456 - RNA, 19 nt, Artificial Sequence
  RNA for silencing
gcaguuuuuaccagccauc

SEQ ID NO: 457 - RNA, 19 nt, Artificial Sequence
  RNA for silencing
caguuuuuaccagccaucc

SEQ ID NO: 458 - RNA, 19 nt, Artificial Sequence
  RNA for silencing
aguuuuuaccagccauccc

SEQ ID NO: 459 - RNA, 19 nt, Artificial Sequence
  RNA for silencing
guuuuuaccagccaucccu

SEQ ID NO: 460 - RNA, 19 nt, Artificial Sequence
  RNA for silencing
uuuuuaccagccaucccug

SEQ ID NO: 461 - RNA, 19 nt, Artificial Sequence
  RNA for silencing
uuuuaccagccaucccugu

SEQ ID NO: 462 - RNA, 19 nt, Artificial Sequence
  RNA for silencing
uuuaccagccaucccugua

SEQ ID NO: 463 - RNA, 19 nt, Artificial Sequence
  RNA for silencing
uuaccagccaucccuguau

SEQ ID NO: 464 - RNA, 19 nt, Artificial Sequence
  RNA for silencing
uaccagccaucccuguauc

SEQ ID NO: 465 - RNA, 19 nt, Artificial Sequence
  RNA for silencing
accagccaucccuguaucc

SEQ ID NO: 466 - RNA, 19 nt, Artificial Sequence
  RNA for silencing
ccagccaucccuguauccu

SEQ ID NO: 467 - RNA, 19 nt, Artificial Sequence
  RNA for silencing
cagccaucccuguauccuu

SEQ ID NO: 468 - RNA, 19 nt, Artificial Sequence
  RNA for silencing
agccaucccuguauccuua

SEQ ID NO: 469 - RNA, 19 nt, Artificial Sequence
  RNA for silencing
gccaucccuguauccuuac

SEQ ID NO: 470 - RNA, 19 nt, Artificial Sequence
  RNA for silencing
ccaucccuguauccuuacu

SEQ ID NO: 471 - RNA, 19 nt, Artificial Sequence
  RNA for silencing
caucccuguauccuuacua

SEQ ID NO: 472 - RNA, 19 nt, Artificial Sequence
  RNA for silencing
aucccuguauccuuacuau

SEQ ID NO: 473 - RNA, 19 nt, Artificial Sequence
  RNA for silencing
ucccuguauccuuacuaua

SEQ ID NO: 474 - RNA, 19 nt, Artificial Sequence
  RNA for silencing
cccuguauccuuacuauaa

SEQ ID NO: 475 - RNA, 19 nt, Artificial Sequence
  RNA for silencing
ccuguauccuuacuauaac

SEQ ID NO: 476 - RNA, 19 nt, Artificial Sequence
  RNA for silencing
cuguauccuuacuauaaca

SEQ ID NO: 477 - RNA, 19 nt, Artificial Sequence
  RNA for silencing
uguauccuuacuauaacaa

SEQ ID NO: 478 - RNA, 19 nt, Artificial Sequence
  RNA for silencing
guauccuuacuauaacaac

SEQ ID NO: 479 - RNA, 19 nt, Artificial Sequence
  RNA for silencing
uauccuuacuauaacaacc

SEQ ID NO: 480 - RNA, 19 nt, Artificial Sequence
  RNA for silencing
auccuuacuauaacaaccu

SEQ ID NO: 481 - RNA, 19 nt, Artificial Sequence
  RNA for silencing
uccuuacuauaacaaccug

SEQ ID NO: 482 - RNA, 19 nt, Artificial Sequence
  RNA for silencing
ccuuacuauaacaaccugu

SEQ ID NO: 483 - RNA, 19 nt, Artificial Sequence
  RNA for silencing
cuuacuauaacaaccugua

SEQ ID NO: 484 - RNA, 19 nt, Artificial Sequence
  RNA for silencing
uuacuauaacaaccuguac

SEQ ID NO: 485 - RNA, 19 nt, Artificial Sequence
  RNA for silencing
uacuauaacaaccuguaca

SEQ ID NO: 486 - RNA, 19 nt, Artificial Sequence
  RNA for silencing
acuauaacaaccuguacaa

SEQ ID NO: 487 - RNA, 19 nt, Artificial Sequence
  RNA for silencing
cuauaacaaccuguacaac

SEQ ID NO: 488 - RNA, 19 nt, Artificial Sequence
  RNA for silencing
uauaacaaccuguacaacu

SEQ ID NO: 489 - RNA, 19 nt, Artificial Sequence
  RNA for silencing
auaacaaccuguacaacua

SEQ ID NO: 490 - RNA, 19 nt, Artificial Sequence
  RNA for silencing
uaacaaccuguacaacuac

SEQ ID NO: 491 - RNA, 19 nt, Artificial Sequence
  RNA for silencing
aacaaccuguacaacuacu

SEQ ID NO: 492 - RNA, 19 nt, Artificial Sequence
  RNA for silencing
acaaccuguacaacuacuc

SEQ ID NO: 493 - RNA, 19 nt, Artificial Sequence
  RNA for silencing
caaccuguacaacuacucc

SEQ ID NO: 494 - RNA, 19 nt, Artificial Sequence
  RNA for silencing
aaccuguacaacuacuccc

SEQ ID NO: 495 - RNA, 19 nt, Artificial Sequence
  RNA for silencing
accuguacaacuacuccca

SEQ ID NO: 496 - RNA, 19 nt, Artificial Sequence
  RNA for silencing
ccuguacaacuacucccag

SEQ ID NO: 497 - RNA, 19 nt, Artificial Sequence
  RNA for silencing
cuguacaacuacucccagu

SEQ ID NO: 498 - RNA, 19 nt, Artificial Sequence
  RNA for silencing
uguacaacuacucccagua

SEQ ID NO: 499 - RNA, 19 nt, Artificial Sequence
  RNA for silencing
guacaacuacucccaguac

SEQ ID NO: 500 - RNA, 19 nt, Artificial Sequence
  RNA for silencing
uacaacuacucccaguacc

SEQ ID NO: 501 - RNA, 19 nt, Artificial Sequence
  RNA for silencing
acaacuacucccaguacca

SEQ ID NO: 502 - RNA, 19 nt, Artificial Sequence
  RNA for silencing
caacuacucccaguaccaa

SEQ ID NO: 503 - RNA, 19 nt, Artificial Sequence
  RNA for silencing
aacuacucccaguaccaaa

SEQ ID NO: 504 - RNA, 19 nt, Artificial Sequence
  RNA for silencing
acuacucccaguaccaaau

SEQ ID NO: 505 - RNA, 19 nt, Artificial Sequence
  RNA for silencing
cuacucccaguaccaaaug

SEQ ID NO: 506 - RNA, 19 nt, Artificial Sequence
  RNA for silencing
uacucccaguaccaaaugg

SEQ ID NO: 507 - RNA, 19 nt, Artificial Sequence
  RNA for silencing
acucccaguaccaaauggc

SEQ ID NO: 508 - RNA, 19 nt, Artificial Sequence
  RNA for silencing
cucccaguaccaaauggca

SEQ ID NO: 509 - RNA, 19 nt, Artificial Sequence
  RNA for silencing
ucccaguaccaaauggcag

SEQ ID NO: 510 - RNA, 19 nt, Artificial Sequence
  RNA for silencing
cccaguaccaaauggcagu

SEQ ID NO: 511 - RNA, 19 nt, Artificial Sequence
  RNA for silencing
ccaguaccaaauggcagug

SEQ ID NO: 512 - RNA, 19 nt, Artificial Sequence
  RNA for silencing
caguaccaaauggcagugg

SEQ ID NO: 513 - RNA, 19 nt, Artificial Sequence
  RNA for silencing
aguaccaaauggcaguggc

SEQ ID NO: 514 - RNA, 19 nt, Artificial Sequence
  RNA for silencing
guaccaaauggcaguggcc

SEQ ID NO: 515 - RNA, 19 nt, Artificial Sequence
  RNA for silencing
uaccaaauggcaguggcca

SEQ ID NO: 516 - RNA, 19 nt, Artificial Sequence
  RNA for silencing
accaaauggcaguggccac

SEQ ID NO: 517 - RNA, 19 nt, Artificial Sequence
  RNA for silencing
ccaaauggcaguggccacu

SEQ ID NO: 518 - RNA, 19 nt, Artificial Sequence
  RNA for silencing
caaauggcaguggccacug

SEQ ID NO: 519 - RNA, 19 nt, artificial
  RNA for silencing
aaauggcaguggccacuga

SEQ ID NO: 520 - RNA, 19 nt, artificial
  RNA for silencing
aauggcaguggccacugag

SEQ ID NO: 521 - RNA, 19 nt, artificial
  RNA for silencing
auggcaguggccacugagu

SEQ ID NO: 522 - RNA, 19 nt, artificial
  RNA for silencing
uggcaguggccacugaguc

SEQ ID NO: 523 - RNA, 19 nt, artificial
  RNA for silencing
ggcaguggccacugagucu

SEQ ID NO: 524 - RNA, 19 nt, artificial
  RNA for silencing
gcaguggccacugagucuu

SEQ ID NO: 525 - RNA, 19 nt, artificial
  RNA for silencing
caguggccacugagucuuc

SEQ ID NO: 526 - RNA, 19 nt, artificial
  RNA for silencing
aguggccacugagucuucc

SEQ ID NO: 527 - RNA, 19 nt, artificial
  RNA for silencing
guggccacugagucuuccu

SEQ ID NO: 528 - RNA, 19 nt, artificial
  RNA for silencing
uggccacugagucuuccuc

SEQ ID NO: 529 - RNA, 19 nt, artificial
  RNA for silencing
ggccacugagucuuccuca

SEQ ID NO: 530 - RNA, 19 nt, artificial
  RNA for silencing
gccacugagucuuccucaa

SEQ ID NO: 531 - RNA, 19 nt, artificial
  RNA for silencing
ccacugagucuuccucaag

SEQ ID NO: 532 - RNA, 19 nt, artificial
  RNA for silencing
cacugagucuuccucaagu

SEQ ID NO: 533 - RNA, 19 nt, artificial
  RNA for silencing
acugagucuuccucaagug

SEQ ID NO: 534 - RNA, 19 nt, artificial
  RNA for silencing
cugagucuuccucaaguga

SEQ ID NO: 535 - RNA, 19 nt, artificial
  RNA for silencing
ugagucuuccucaagugag

SEQ ID NO: 536 - RNA, 19 nt, artificial
  RNA for silencing
gagucuuccucaagugaga

SEQ ID NO: 537 - RNA, 19 nt, artificial
  RNA for silencing
agucuuccucaagugagac

SEQ ID NO: 538 - RNA, 19 nt, artificial
  RNA for silencing
gucuuccucaagugagaca

SEQ ID NO: 539 - RNA, 19 nt, artificial
  RNA for silencing
ucuuccucaagugagacag

SEQ ID NO: 540 - RNA, 19 nt, artificial
  RNA for silencing
cuuccucaagugagacagg

SEQ ID NO: 541 - RNA, 19 nt, artificial
  RNA for silencing
uuccucaagugagacaggg

SEQ ID NO: 542 - RNA, 19 nt, artificial
  RNA for silencing
uccucaagugagacagggg

SEQ ID NO: 543 - RNA, 19 nt, artificial
  RNA for silencing
ccucaagugagacaggggg

SEQ ID NO: 544 - RNA, 19 nt, artificial
  RNA for silencing
cucaagugagacagggggu

SEQ ID NO: 545 - RNA, 19 nt, artificial
  RNA for silencing
ucaagugagacagggggua

SEQ ID NO: 546 - RNA, 19 nt, artificial
  RNA for silencing
caagugagacaggggguac

SEQ ID NO: 547 - RNA, 19 nt, artificial
  RNA for silencing
aagugagacaggggguacg

SEQ ID NO: 548 - RNA, 19 nt, artificial
  RNA for silencing
agugagacaggggguacgu

SEQ ID NO: 549 - RNA, 19 nt, artificial
  RNA for silencing
gugagacaggggguacguu

SEQ ID NO: 550 - RNA, 19 nt, artificial
  RNA for silencing
ugagacaggggguacguuu

SEQ ID NO: 551 - RNA, 19 nt, artificial
  RNA for silencing
gagacaggggguacguuug

SEQ ID NO: 552 - RNA, 19 nt, artificial
  RNA for silencing
agacaggggguacguuugu

SEQ ID NO: 553 - RNA, 19 nt, artificial
  RNA for silencing
gacaggggguacguuugua

SEQ ID NO: 554 - RNA, 19 nt, artificial
  RNA for silencing
acaggggguacguuuguag

SEQ ID NO: 555 - RNA, 19 nt, artificial
  RNA for silencing
caggggguacguuuguagg

SEQ ID NO: 556 - RNA, 19 nt, artificial
  RNA for silencing
aggggguacguuuguaggg

SEQ ID NO: 557 - RNA, 19 nt, artificial
  RNA for silencing
ggggguacguuuguagggu

SEQ ID NO: 558 - RNA, 19 nt, artificial
  RNA for silencing
gggguacguuuguaggguc

SEQ ID NO: 559 - RNA, 19 nt, artificial
  RNA for silencing
ggguacguuuguaggguca

SEQ ID NO: 560 - RNA, 19 nt, artificial
  RNA for silencing
gguacguuuguagggucag

SEQ ID NO: 561 - RNA, 19 nt, artificial
  RNA for silencing
guacguuuguagggucagc

SEQ ID NO: 562 - RNA, 19 nt, artificial
  RNA for silencing
uacguuuguagggucagcc

SEQ ID NO: 563 - RNA, 19 nt, artificial
  RNA for silencing
acguuuguagggucagcca

SEQ ID NO: 564 - RNA, 19 nt, artificial
  RNA for silencing
cguuuguagggucagccau

SEQ ID NO: 565 - RNA, 19 nt, artificial
  RNA for silencing
guuuguagggucagccaug

SEQ ID NO: 566 - RNA, 19 nt, artificial
  RNA for silencing
uuuguagggucagccauga

SEQ ID NO: 567 - RNA, 19 nt, artificial
  RNA for silencing
uuguagggucagccaugaa

SEQ ID NO: 568 - RNA, 19 nt, artificial
  RNA for silencing
uguagggucagccaugaaa

SEQ ID NO: 569 - RNA, 19 nt, artificial
  RNA for silencing
guagggucagccaugaaaa

SEQ ID NO: 570 - RNA, 19 nt, artificial
  RNA for silencing
uagggucagccaugaaaaa

SEQ ID NO: 571 - RNA, 19 nt, artificial
  RNA for silencing
agggucagccaugaaaaac

SEQ ID NO: 572 - RNA, 19 nt, artificial
  RNA for silencing
gggucagccaugaaaaaca

SEQ ID NO: 573 - RNA, 19 nt, artificial
  RNA for silencing
ggucagccaugaaaaacag

SEQ ID NO: 574 - RNA, 19 nt, artificial
  RNA for silencing
gucagccaugaaaaacagc

SEQ ID NO: 575 - RNA, 19 nt, artificial
  RNA for silencing
ucagccaugaaaaacagcc

SEQ ID NO: 576 - RNA, 19 nt, artificial
  RNA for silencing
cagccaugaaaaacagccu

SEQ ID NO: 577 - RNA, 19 nt, artificial
  RNA for silencing
agccaugaaaaacagccuu

SEQ ID NO: 578 - RNA, 19 nt, artificial
  RNA for silencing
gccaugaaaaacagccuuc

SEQ ID NO: 579 - RNA, 19 nt, artificial
  RNA for silencing
ccaugaaaaacagccuucg

SEQ ID NO: 580 - RNA, 19 nt, artificial
  RNA for silencing
caugaaaaacagccuucga

SEQ ID NO: 581 - RNA, 19 nt, artificial
  RNA for silencing
augaaaaacagccuucgaa

SEQ ID NO: 582 - RNA, 19 nt, artificial
  RNA for silencing
ugaaaaacagccuucgaag

SEQ ID NO: 583 - RNA, 19 nt, artificial
  RNA for silencing
gaaaaacagccuucgaagc

SEQ ID NO: 584 - RNA, 19 nt, artificial
  RNA for silencing
aaaaacagccuucgaagcc

SEQ ID NO: 585 - RNA, 19 nt, artificial
  RNA for silencing
aaaacagccuucgaagccu

SEQ ID NO: 586 - RNA, 19 nt, artificial
  RNA for silencing
aaacagccuucgaagccuc

SEQ ID NO: 587 - RNA, 19 nt, artificial
  RNA for silencing
aacagccuucgaagccucc

SEQ ID NO: 588 - RNA, 19 nt, artificial
  RNA for silencing
acagccuucgaagccuccc

SEQ ID NO: 589 - RNA, 19 nt, artificial
  RNA for silencing
cagccuucgaagccuccca

SEQ ID NO: 590 - RNA, 19 nt, artificial
  RNA for silencing
agccuucgaagccucccag

SEQ ID NO: 591 - RNA, 19 nt, artificial
  RNA for silencing
gccuucgaagccucccagc

SEQ ID NO: 592 - RNA, 19 nt, artificial
  RNA for silencing
ccuucgaagccucccagca

SEQ ID NO: 593 - RNA, 19 nt, artificial
  RNA for silencing
cuucgaagccucccagcaa

SEQ ID NO: 594 - RNA, 19 nt, artificial
  RNA for silencing
uucgaagccucccagcaac

SEQ ID NO: 595 - RNA, 19 nt, artificial
  RNA for silencing
ucgaagccucccagcaaca

SEQ ID NO: 596 - RNA, 19 nt, artificial
  RNA for silencing
cgaagccucccagcaacau

SEQ ID NO: 597 - RNA, 19 nt, artificial
  RNA for silencing
gaagccucccagcaacaua

SEQ ID NO: 598 - RNA, 19 nt, artificial
  RNA for silencing
aagccucccagcaacauac

SEQ ID NO: 599 - RNA, 19 nt, artificial
  RNA for silencing
agccucccagcaacauaca

SEQ ID NO: 600 - RNA, 19 nt, artificial
  RNA for silencing
gccucccagcaacauacau

SEQ ID NO: 601 - RNA, 19 nt, artificial
  RNA for silencing
ccucccagcaacauacaug

SEQ ID NO: 602 - RNA, 19 nt, artificial
  RNA for silencing
cucccagcaacauacaugu

SEQ ID NO: 603 - RNA, 19 nt, artificial
  RNA for silencing
ucccagcaacauacauguc

SEQ ID NO: 604 - RNA, 19 nt, artificial
  RNA for silencing
cccagcaacauacauguca

SEQ ID NO: 605 - RNA, 19 nt, artificial
  RNA for silencing
ccagcaacauacaugucaa

SEQ ID NO: 606 - RNA, 19 nt, artificial
  RNA for silencing
cagcaacauacaugucaag

SEQ ID NO: 607 - RNA, 19 nt, artificial
  RNA for silencing
agcaacauacaugucaagc

SEQ ID NO: 608 - RNA, 19 nt, artificial
  RNA for silencing
gcaacauacaugucaagcc

SEQ ID NO: 609 - RNA, 19 nt, artificial
  RNA for silencing
caacauacaugucaagcca

SEQ ID NO: 610 - RNA, 19 nt, artificial
  RNA for silencing
aacauacaugucaagccag

SEQ ID NO: 611 - RNA, 19 nt, artificial
  RNA for silencing
acauacaugucaagccagu

SEQ ID NO: 612 - RNA, 19 nt, artificial
  RNA for silencing
cauacaugucaagccaguc

SEQ ID NO: 613 - RNA, 19 nt, artificial
  RNA for silencing
auacaugucaagccaguca

SEQ ID NO: 614 - RNA, 19 nt, artificial
  RNA for silencing
uacaugucaagccagucag

SEQ ID NO: 615 - RNA, 19 nt, artificial
  RNA for silencing
acaugucaagccagucagg

SEQ ID NO: 616 - RNA, 19 nt, artificial
  RNA for silencing
caugucaagccagucagga

SEQ ID NO: 617 - RNA, 19 nt, artificial
  RNA for silencing
augucaagccagucaggaa

SEQ ID NO: 618 - RNA, 19 nt, artificial
  RNA for silencing
ugucaagccagucaggaaa

SEQ ID NO: 619 - RNA, 19 nt, artificial
  RNA for silencing
gucaagccagucaggaaaa

SEQ ID NO: 620 - RNA, 19 nt, artificial
  RNA for silencing
ucaagccagucaggaaaac

SEQ ID NO: 621 - RNA, 19 nt, artificial
  RNA for silencing
caagccagucaggaaaaca

SEQ ID NO: 622 - RNA, 19 nt, artificial
  RNA for silencing
aagccagucaggaaaacag

SEQ ID NO: 623 - RNA, 19 nt, artificial
  RNA for silencing
agccagucaggaaaacagu

SEQ ID NO: 624 - RNA, 19 nt, artificial
  RNA for silencing
gccagucaggaaaacagug

SEQ ID NO: 625 - RNA, 19 nt, artificial
  RNA for silencing
ccagucaggaaaacagugg

SEQ ID NO: 626 - RNA, 19 nt, artificial
  RNA for silencing
cagucaggaaaacaguggc

SEQ ID NO: 627 - RNA, 19 nt, artificial
  RNA for silencing
agucaggaaaacaguggca

SEQ ID NO: 628 - RNA, 19 nt, artificial
  RNA for silencing
gucaggaaaacaguggcag

SEQ ID NO: 629 - RNA, 19 nt, artificial
  RNA for silencing
ucaggaaaacaguggcaga

SEQ ID NO: 630 - RNA, 19 nt, artificial
  RNA for silencing
caggaaaacaguggcagau

SEQ ID NO: 631 - RNA, 19 nt, artificial
  RNA for silencing
aggaaaacaguggcagaug

SEQ ID NO: 632 - RNA, 19 nt, artificial
  RNA for silencing
ggaaaacaguggcagauga

SEQ ID NO: 633 - RNA, 19 nt, artificial
  RNA for silencing
gaaaacaguggcagaugaa

SEQ ID NO: 634 - RNA, 19 nt, artificial
  RNA for silencing
aaaacaguggcagaugaag

SEQ ID NO: 635 - RNA, 19 nt, artificial
  RNA for silencing
aaacaguggcagaugaagg

SEQ ID NO: 636 - RNA, 19 nt, artificial
  RNA for silencing
aacaguggcagaugaaggg

SEQ ID NO: 637 - RNA, 19 nt, artificial
  RNA for silencing
acaguggcagaugaaggga

SEQ ID NO: 638 - RNA, 19 nt, artificial
  RNA for silencing
caguggcagaugaagggaa

SEQ ID NO: 639 - RNA, 19 nt, artificial
  RNA for silencing
aguggcagaugaagggaau

SEQ ID NO: 640 - RNA, 19 nt, artificial
  RNA for silencing
guggcagaugaagggaaug

SEQ ID NO: 641 - RNA, 19 nt, artificial
  RNA for silencing
uggcagaugaagggaaugg

SEQ ID NO: 642 - RNA, 19 nt, artificial
  RNA for silencing
ggcagaugaagggaaugga

SEQ ID NO: 643 - RNA, 19 nt, artificial
  RNA for silencing
gcagaugaagggaauggag

SEQ ID NO: 644 - RNA, 19 nt, artificial
  RNA for silencing
cagaugaagggaauggaga

SEQ ID NO: 645 - RNA, 19 nt, artificial
  RNA for silencing
agaugaagggaauggagaa

SEQ ID NO: 646 - RNA, 19 nt, artificial
  RNA for silencing
gaugaagggaauggagaac

SEQ ID NO: 647 - RNA, 19 nt, artificial
  RNA for silencing
augaagggaauggagaacc

SEQ ID NO: 648 - RNA, 19 nt, artificial
  RNA for silencing
ugaagggaauggagaaccg

SEQ ID NO: 649 - RNA, 19 nt, artificial
  RNA for silencing
gaagggaauggagaaccgc

SEQ ID NO: 650 - RNA, 19 nt, artificial
  RNA for silencing
aagggaauggagaaccgcc

SEQ ID NO: 651 - RNA, 19 nt, artificial
  RNA for silencing
agggaauggagaaccgcca

SEQ ID NO: 652 - RNA, 19 nt, artificial
  RNA for silencing
gggaauggagaaccgccau

SEQ ID NO: 653 - RNA, 19 nt, artificial
  RNA for silencing
ggaauggagaaccgccaug

SEQ ID NO: 654 - RNA, 19 nt, artificial
  RNA for silencing
gaauggagaaccgccaugc

SEQ ID NO: 655 - RNA, 19 nt, artificial
  RNA for silencing
aauggagaaccgccaugcc

SEQ ID NO: 656 - RNA, 19 nt, artificial
  RNA for silencing
auggagaaccgccaugcca

SEQ ID NO: 657 - RNA, 19 nt, artificial
  RNA for silencing
uggagaaccgccaugccau

SEQ ID NO: 658 - RNA, 19 nt, artificial
  RNA for silencing
ggagaaccgccaugccaug

SEQ ID NO: 659 - RNA, 19 nt, artificial
  RNA for silencing
gagaaccgccaugccauga

SEQ ID NO: 660 - RNA, 19 nt, artificial
  RNA for silencing
agaaccgccaugccaugag

SEQ ID NO: 661 - RNA, 19 nt, artificial
  RNA for silencing
gaaccgccaugccaugagc

SEQ ID NO: 662 - RNA, 19 nt, artificial
  RNA for silencing
aaccgccaugccaugagcu

SEQ ID NO: 663 - RNA, 19 nt, artificial
  RNA for silencing
accgccaugccaugagcuc

SEQ ID NO: 664 - RNA, 19 nt, artificial
  RNA for silencing
ccgccaugccaugagcucc

SEQ ID NO: 665 - RNA, 19 nt, artificial
  RNA for silencing
cgccaugccaugagcuccc

SEQ ID NO: 666 - RNA, 19 nt, artificial
  RNA for silencing
gccaugccaugagcuccca

SEQ ID NO: 667 - RNA, 19 nt, artificial
  RNA for silencing
ccaugccaugagcucccag

SEQ ID NO: 668 - RNA, 19 nt, artificial
  RNA for silencing
caugccaugagcucccagu

SEQ ID NO: 669 - RNA, 19 nt, artificial
  RNA for silencing
augccaugagcucccagua

SEQ ID NO: 670 - RNA, 19 nt, artificial
  RNA for silencing
ugccaugagcucccaguac

SEQ ID NO: 671 - RNA, 19 nt, artificial
  RNA for silencing
gccaugagcucccaguacc

SEQ ID NO: 672 - RNA, 19 nt, artificial
  RNA for silencing
ccaugagcucccaguaccg

SEQ ID NO: 673 - RNA, 19 nt, artificial
  RNA for silencing
caugagcucccaguaccgg

SEQ ID NO: 674 - RNA, 19 nt, artificial
  RNA for silencing
augagcucccaguaccgga

SEQ ID NO: 675 - RNA, 19 nt, artificial
  RNA for silencing
ugagcucccaguaccggau

SEQ ID NO: 676 - RNA, 19 nt, artificial
  RNA for silencing
gagcucccaguaccggaug

SEQ ID NO: 677 - RNA, 19 nt, artificial
  RNA for silencing
agcucccaguaccggaugu

SEQ ID NO: 678 - RNA, 19 nt, artificial
  RNA for silencing
gcucccaguaccggaugug

SEQ ID NO: 679 - RNA, 19 nt, artificial
  RNA for silencing
cucccaguaccggaugugc

SEQ ID NO: 680 - RNA, 19 nt, artificial
  RNA for silencing
ucccaguaccggaugugcu

SEQ ID NO: 681 - RNA, 19 nt, artificial
  RNA for silencing
cccaguaccggaugugcuc

SEQ ID NO: 682 - RNA, 19 nt, artificial
  RNA for silencing
ccaguaccggaugugcucc

SEQ ID NO: 683 - RNA, 19 nt, artificial
  RNA for silencing
caguaccggaugugcuccu

SEQ ID NO: 684 - RNA, 19 nt, artificial
  RNA for silencing
aguaccggaugugcuccua

SEQ ID NO: 685 - RNA, 19 nt, artificial
  RNA for silencing
guaccggaugugcuccuac

SEQ ID NO: 686 - RNA, 19 nt, artificial
  RNA for silencing
uaccggaugugcuccuacu

SEQ ID NO: 687 - RNA, 19 nt, artificial
  RNA for silencing
accggaugugcuccuacua

SEQ ID NO: 688 - RNA, 19 nt, artificial
  RNA for silencing
ccggaugugcuccuacuac

SEQ ID NO: 689 - RNA, 19 nt, artificial
  RNA for silencing
cggaugugcuccuacuacc

SEQ ID NO: 690 - RNA, 19 nt, artificial
  RNA for silencing
ggaugugcuccuacuaccc

SEQ ID NO: 691 - RNA, 19 nt, artificial
  RNA for silencing
gaugugcuccuacuacccg

SEQ ID NO: 692 - RNA, 19 nt, artificial
  RNA for silencing
augugcuccuacuacccgc

SEQ ID NO: 693 - RNA, 19 nt, artificial
  RNA for silencing
ugugcuccuacuacccgcc

SEQ ID NO: 694 - RNA, 19 nt, artificial
  RNA for silencing
gugcuccuacuacccgccc

SEQ ID NO: 695 - RNA, 19 nt, artificial
  RNA for silencing
ugcuccuacuacccgccca

SEQ ID NO: 696 - RNA, 19 nt, artificial
  RNA for silencing
gcuccuacuacccgcccac

SEQ ID NO: 697 - RNA, 19 nt, artificial
  RNA for silencing
cuccuacuacccgcccacc

SEQ ID NO: 698 - RNA, 19 nt, artificial
  RNA for silencing
uccuacuacccgcccaccu

SEQ ID NO: 699 - RNA, 19 nt, artificial
  RNA for silencing
ccuacuacccgcccaccuc

SEQ ID NO: 700 - RNA, 19 nt, artificial
  RNA for silencing
cuacuacccgcccaccuca

SEQ ID NO: 701 - RNA, 19 nt, artificial
  RNA for silencing
uacuacccgcccaccucau

SEQ ID NO: 702 - RNA, 19 nt, artificial
  RNA for silencing
acuacccgcccaccucaua

SEQ ID NO: 703 - RNA, 19 nt, artificial
  RNA for silencing
cuacccgcccaccucauac

SEQ ID NO: 704 - RNA, 19 nt, artificial
  RNA for silencing
uacccgcccaccucauacc

SEQ ID NO: 705 - RNA, 19 nt, artificial
  RNA for silencing
acccgcccaccucauaccu

SEQ ID NO: 706 - RNA, 19 nt, artificial
  RNA for silencing
cccgcccaccucauaccug

SEQ ID NO: 707 - RNA, 19 nt, artificial
  RNA for silencing
ccgcccaccucauaccugg

SEQ ID NO: 708 - RNA, 19 nt, artificial
  RNA for silencing
cgcccaccucauaccuggg

SEQ ID NO: 709 - RNA, 19 nt, artificial
  RNA for silencing
gcccaccucauaccugggc

SEQ ID NO: 710 - RNA, 19 nt, artificial
  RNA for silencing
cccaccucauaccugggcc

SEQ ID NO: 711 - RNA, 19 nt, artificial
  RNA for silencing
ccaccucauaccugggcca

SEQ ID NO: 712 - RNA, 19 nt, artificial
  RNA for silencing
caccucauaccugggccag

SEQ ID NO: 713 - RNA, 19 nt, artificial
  RNA for silencing
accucauaccugggccagg

SEQ ID NO: 714 - RNA, 19 nt, artificial
  RNA for silencing
ccucauaccugggccaggg

SEQ ID NO: 715 - RNA, 19 nt, artificial
  RNA for silencing
cucauaccugggccagggg

SEQ ID NO: 716 - RNA, 19 nt, artificial
  RNA for silencing
ucauaccugggccaggggg

SEQ ID NO: 717 - RNA, 19 nt, artificial
  RNA for silencing
cauaccugggccagggggu

SEQ ID NO: 718 - RNA, 19 nt, artificial
  RNA for silencing
auaccugggccaggggguu

SEQ ID NO: 719 - RNA, 19 nt, artificial
  RNA for silencing
uaccugggccaggggguug

SEQ ID NO: 720 - RNA, 19 nt, artificial
  RNA for silencing
accugggccaggggguugg

SEQ ID NO: 721 - RNA, 19 nt, artificial
  RNA for silencing
ccugggccaggggguuggc

SEQ ID NO: 722 - RNA, 19 nt, artificial
  RNA for silencing
cugggccaggggguuggca

SEQ ID NO: 723 - RNA, 19 nt, artificial
  RNA for silencing
ugggccaggggguuggcag

SEQ ID NO: 724 - RNA, 19 nt, artificial
  RNA for silencing
gggccaggggguuggcagu

SEQ ID NO: 725 - RNA, 19 nt, artificial
  RNA for silencing
ggccaggggguuggcaguc

SEQ ID NO: 726 - RNA, 19 nt, artificial
  RNA for silencing
gccaggggguuggcagucc

SEQ ID NO: 727 - RNA, 19 nt, artificial
  RNA for silencing
ccaggggguuggcaguccc

SEQ ID NO: 728 - RNA, 19 nt, artificial
  RNA for silencing
caggggguuggcaguccca

SEQ ID NO: 729 - RNA, 19 nt, artificial
  RNA for silencing
aggggguuggcagucccac

SEQ ID NO: 730 - RNA, 19 nt, artificial
  RNA for silencing
ggggguuggcagucccacc

SEQ ID NO: 731 - RNA, 19 nt, artificial
  RNA for silencing
gggguuggcagucccaccu

SEQ ID NO: 732 - RNA, 19 nt, artificial
  RNA for silencing
ggguuggcagucccaccug

SEQ ID NO: 733 - RNA, 19 nt, artificial
  RNA for silencing
gguuggcagucccaccugc

SEQ ID NO: 734 - RNA, 19 nt, artificial
  RNA for silencing
guuggcagucccaccugcg

SEQ ID NO: 735 - RNA, 19 nt, artificial
  RNA for silencing
uuggcagucccaccugcgu

SEQ ID NO: 736 - RNA, 19 nt, artificial
  RNA for silencing
uggcagucccaccugcguc

SEQ ID NO: 737 - RNA, 19 nt, artificial
  RNA for silencing
ggcagucccaccugcguca

SEQ ID NO: 738 - RNA, 19 nt, artificial
  RNA for silencing
gcagucccaccugcgucac

SEQ ID NO: 739 - RNA, 19 nt, artificial
  RNA for silencing
cagucccaccugcgucaca

SEQ ID NO: 740 - RNA, 19 nt, artificial
  RNA for silencing
agucccaccugcgucacac

SEQ ID NO: 741 - RNA, 19 nt, artificial
  RNA for silencing
gucccaccugcgucacaca

SEQ ID NO: 742 - RNA, 19 nt, artificial
  RNA for silencing
ucccaccugcgucacacag

SEQ ID NO: 743 - RNA, 19 nt, artificial
  RNA for silencing
cccaccugcgucacacaga

SEQ ID NO: 744 - RNA, 19 nt, artificial
  RNA for silencing
ccaccugcgucacacagau

SEQ ID NO: 745 - RNA, 19 nt, artificial
  RNA for silencing
caccugcgucacacagaua

SEQ ID NO: 746 - RNA, 19 nt, artificial
  RNA for silencing
accugcgucacacagauac

SEQ ID NO: 747 - RNA, 19 nt, artificial
  RNA for silencing
ccugcgucacacagauacu

SEQ ID NO: 748 - RNA, 19 nt, artificial
  RNA for silencing
cugcgucacacagauacug

SEQ ID NO: 749 - RNA, 19 nt, artificial
  RNA for silencing
ugcgucacacagauacugg

SEQ ID NO: 750 - RNA, 19 nt, artificial
  RNA for silencing
gcgucacacagauacuggc

SEQ ID NO: 751 - RNA, 19 nt, artificial
  RNA for silencing
cgucacacagauacuggcc

SEQ ID NO: 752 - RNA, 19 nt, artificial
  RNA for silencing
gucacacagauacuggccu

SEQ ID NO: 753 - RNA, 19 nt, artificial
  RNA for silencing
ucacacagauacuggccuc

SEQ ID NO: 754 - RNA, 19 nt, artificial
  RNA for silencing
cacacagauacuggccucg

SEQ ID NO: 755 - RNA, 19 nt, artificial
  RNA for silencing
acacagauacuggccucgg

SEQ ID NO: 756 - RNA, 19 nt, artificial
  RNA for silencing
cacagauacuggccucgga

SEQ ID NO: 757 - RNA, 19 nt, artificial
  RNA for silencing
acagauacuggccucggag

SEQ ID NO: 758 - RNA, 19 nt, artificial
  RNA for silencing
cagauacuggccucggagg

SEQ ID NO: 759 - RNA, 19 nt, artificial
  RNA for silencing
agauacuggccucggagga

SEQ ID NO: 760 - RNA, 19 nt, artificial
  RNA for silencing
gauacuggccucggaggac

SEQ ID NO: 761 - RNA, 19 nt, artificial
  RNA for silencing
auacuggccucggaggaca

SEQ ID NO: 762 - RNA, 19 nt, artificial
  RNA for silencing
uacuggccucggaggacac

SEQ ID NO: 763 - RNA, 19 nt, artificial
  RNA for silencing
acuggccucggaggacacc

SEQ ID NO: 764 - RNA, 19 nt, artificial
  RNA for silencing
cuggccucggaggacaccc

SEQ ID NO: 765 - RNA, 19 nt, artificial
  RNA for silencing
uggccucggaggacacccc

SEQ ID NO: 766 - RNA, 19 nt, artificial
  RNA for silencing
ggccucggaggacaccccc

SEQ ID NO: 767 - RNA, 19 nt, artificial
  RNA for silencing
gccucggaggacacccccu

SEQ ID NO: 768 - RNA, 19 nt, artificial
  RNA for silencing
ccucggaggacacccccuc

SEQ ID NO: 769 - RNA, 19 nt, artificial
  RNA for silencing
cucggaggacacccccucc

SEQ ID NO: 770 - RNA, 19 nt, artificial
  RNA for silencing
ucggaggacacccccuccu

SEQ ID NO: 771 - RNA, 19 nt, artificial
  RNA for silencing
cggaggacacccccuccua

SEQ ID NO: 772 - RNA, 19 nt, artificial
  RNA for silencing
ggaggacacccccuccuac

SEQ ID NO: 773 - RNA, 19 nt, artificial
  RNA for silencing
gaggacacccccuccuacu

SEQ ID NO: 774 - RNA, 19 nt, artificial
  RNA for silencing
aggacacccccuccuacuc

SEQ ID NO: 775 - RNA, 19 nt, artificial
  RNA for silencing
ggacacccccuccuacuca

SEQ ID NO: 776 - RNA, 19 nt, artificial
  RNA for silencing
gacacccccuccuacucag

SEQ ID NO: 777 - RNA, 19 nt, artificial
  RNA for silencing
acacccccuccuacucaga

SEQ ID NO: 778 - RNA, 19 nt, artificial
  RNA for silencing
cacccccuccuacucagag

SEQ ID NO: 779 - RNA, 19 nt, artificial
  RNA for silencing
acccccuccuacucagagu

SEQ ID NO: 780 - RNA, 19 nt, artificial
  RNA for silencing
cccccuccuacucagaguc

SEQ ID NO: 781 - RNA, 19 nt, artificial
  RNA for silencing
ccccuccuacucagagucg

SEQ ID NO: 782 - RNA, 19 nt, artificial
  RNA for silencing
cccuccuacucagagucga

SEQ ID NO: 783 - RNA, 19 nt, artificial
  RNA for silencing
ccuccuacucagagucgaa

SEQ ID NO: 784 - RNA, 19 nt, artificial
  RNA for silencing
cuccuacucagagucgaaa

SEQ ID NO: 785 - RNA, 19 nt, artificial
  RNA for silencing
uccuacucagagucgaaag

SEQ ID NO: 786 - RNA, 19 nt, artificial
  RNA for silencing
ccuacucagagucgaaagc

SEQ ID NO: 787 - RNA, 19 nt, artificial
  RNA for silencing
cuacucagagucgaaagcg

SEQ ID NO: 788 - RNA, 19 nt, artificial
  RNA for silencing
uacucagagucgaaagcga

SEQ ID NO: 789 - RNA, 19 nt, artificial
  RNA for silencing
acucagagucgaaagcgag

SEQ ID NO: 790 - RNA, 19 nt, artificial
  RNA for silencing
cucagagucgaaagcgaga

SEQ ID NO: 791 - RNA, 19 nt, artificial
  RNA for silencing
ucagagucgaaagcgagag

SEQ ID NO: 792 - RNA, 19 nt, artificial
  RNA for silencing
cagagucgaaagcgagagu

SEQ ID NO: 793 - RNA, 19 nt, artificial
  RNA for silencing
agagucgaaagcgagagug

SEQ ID NO: 794 - RNA, 19 nt, artificial
  RNA for silencing
gagucgaaagcgagagugu

SEQ ID NO: 795 - RNA, 19 nt, artificial
  RNA for silencing
agucgaaagcgagaguguu

SEQ ID NO: 796 - RNA, 19 nt, artificial
  RNA for silencing
gucgaaagcgagaguguuu

SEQ ID NO: 797 - RNA, 19 nt, artificial
  RNA for silencing
ucgaaagcgagaguguuuu

SEQ ID NO: 798 - RNA, 19 nt, artificial
  RNA for silencing
cgaaagcgagaguguuuuc

SEQ ID NO: 799 - RNA, 19 nt, artificial
  RNA for silencing
gaaagcgagaguguuuucg

SEQ ID NO: 800 - RNA, 19 nt, artificial
  RNA for silencing
aaagcgagaguguuuucgc

SEQ ID NO: 801 - RNA, 19 nt, artificial
  RNA for silencing
aagcgagaguguuuucgcc

SEQ ID NO: 802 - RNA, 19 nt, artificial
  RNA for silencing
agcgagaguguuuucgccg

SEQ ID NO: 803 - RNA, 19 nt, artificial
  RNA for silencing
gcgagaguguuuucgccgc

SEQ ID NO: 804 - RNA, 19 nt, artificial
  RNA for silencing
cgagaguguuuucgccgcc

SEQ ID NO: 805 - RNA, 19 nt, artificial
  RNA for silencing
gagaguguuuucgccgccc

SEQ ID NO: 806 - RNA, 19 nt, artificial
  RNA for silencing
agaguguuuucgccgccca

SEQ ID NO: 807 - RNA, 19 nt, artificial
  RNA for silencing
gaguguuuucgccgcccag

SEQ ID NO: 808 - RNA, 19 nt, artificial
  RNA for silencing
aguguuuucgccgcccagc

SEQ ID NO: 809 - RNA, 19 nt, artificial
  RNA for silencing
guguuuucgccgcccagca

SEQ ID NO: 810 - RNA, 19 nt, artificial
  RNA for silencing
uguuuucgccgcccagcag

SEQ ID NO: 811 - RNA, 19 nt, artificial
  RNA for silencing
guuuucgccgcccagcagc

SEQ ID NO: 812 - RNA, 19 nt, artificial
  RNA for silencing
uuuucgccgcccagcagcc

SEQ ID NO: 813 - RNA, 19 nt, artificial
  RNA for silencing
uuucgccgcccagcagcca

SEQ ID NO: 814 - RNA, 19 nt, artificial
  RNA for silencing
uucgccgcccagcagccag

SEQ ID NO: 815 - RNA, 19 nt, artificial
  RNA for silencing
ucgccgcccagcagccagg

SEQ ID NO: 816 - RNA, 19 nt, artificial
  RNA for silencing
cgccgcccagcagccagga

SEQ ID NO: 817 - RNA, 19 nt, artificial
  RNA for silencing
gccgcccagcagccaggac

SEQ ID NO: 818 - RNA, 19 nt, artificial
  RNA for silencing
ccgcccagcagccaggacu

SEQ ID NO: 819 - RNA, 19 nt, artificial
  RNA for silencing
cgcccagcagccaggacuc

SEQ ID NO: 820 - RNA, 19 nt, artificial
  RNA for silencing
gcccagcagccaggacucg

SEQ ID NO: 821 - RNA, 19 nt, artificial
  RNA for silencing
cccagcagccaggacucgg

SEQ ID NO: 822 - RNA, 19 nt, artificial
  RNA for silencing
ccagcagccaggacucggg

SEQ ID NO: 823 - RNA, 19 nt, artificial
  RNA for silencing
cagcagccaggacucgggc

SEQ ID NO: 824 - RNA, 19 nt, artificial
  RNA for silencing
agcagccaggacucgggcc

SEQ ID NO: 825 - RNA, 19 nt, artificial
  RNA for silencing
gcagccaggacucgggccu

SEQ ID NO: 826 - RNA, 19 nt, artificial
  RNA for silencing
cagccaggacucgggccug

SEQ ID NO: 827 - RNA, 19 nt, artificial
  RNA for silencing
agccaggacucgggccugg

SEQ ID NO: 828 - RNA, 19 nt, artificial
  RNA for silencing
gccaggacucgggccuggg

SEQ ID NO: 829 - RNA, 19 nt, artificial
  RNA for silencing
ccaggacucgggccugggg

SEQ ID NO: 830 - RNA, 19 nt, artificial
  RNA for silencing
caggacucgggccuggggu

SEQ ID NO: 831 - RNA, 19 nt, artificial
  RNA for silencing
aggacucgggccuggggug

SEQ ID NO: 832 - RNA, 19 nt, artificial
  RNA for silencing
ggacucgggccuggggugc

SEQ ID NO: 833 - RNA, 19 nt, artificial
  RNA for silencing
gacucgggccuggggugcc

SEQ ID NO: 834 - RNA, 19 nt, artificial
  RNA for silencing
acucgggccuggggugccu

SEQ ID NO: 835 - RNA, 19 nt, artificial
  RNA for silencing
cucgggccuggggugccug

SEQ ID NO: 836 - RNA, 19 nt, artificial
  RNA for silencing
ucgggccuggggugccugu

SEQ ID NO: 837 - RNA, 19 nt, artificial
  RNA for silencing
cgggccuggggugccuguc

SEQ ID NO: 838 - RNA, 19 nt, artificial
  RNA for silencing
gggccuggggugccugucg

SEQ ID NO: 839 - RNA, 19 nt, artificial
  RNA for silencing
ggccuggggugccugucga

SEQ ID NO: 840 - RNA, 19 nt, artificial
  RNA for silencing
gccuggggugccugucgag

SEQ ID NO: 841 - RNA, 19 nt, artificial
  RNA for silencing
ccuggggugccugucgagc

SEQ ID NO: 842 - RNA, 19 nt, artificial
  RNA for silencing
cuggggugccugucgagca

SEQ ID NO: 843 - RNA, 19 nt, artificial
  RNA for silencing
uggggugccugucgagcag

SEQ ID NO: 844 - RNA, 19 nt, artificial
  RNA for silencing
ggggugccugucgagcagc

SEQ ID NO: 845 - RNA, 19 nt, artificial
  RNA for silencing
gggugccugucgagcagcg

SEQ ID NO: 846 - RNA, 19 nt, artificial
  RNA for silencing
ggugccugucgagcagcga

SEQ ID NO: 847 - RNA, 19 nt, artificial
  RNA for silencing
gugccugucgagcagcgag

SEQ ID NO: 848 - RNA, 19 nt, artificial
  RNA for silencing
ugccugucgagcagcgaga

SEQ ID NO: 849 - RNA, 19 nt, artificial
  RNA for silencing
gccugucgagcagcgagag

SEQ ID NO: 850 - RNA, 19 nt, artificial
  RNA for silencing
ccugucgagcagcgagagc

SEQ ID NO: 851 - RNA, 19 nt, artificial
  RNA for silencing
cugucgagcagcgagagca

SEQ ID NO: 852 - RNA, 19 nt, artificial
  RNA for silencing
ugucgagcagcgagagcac

SEQ ID NO: 853 - RNA, 19 nt, artificial
  RNA for silencing
gucgagcagcgagagcacc

SEQ ID NO: 854 - RNA, 19 nt, artificial
  RNA for silencing
ucgagcagcgagagcacca

SEQ ID NO: 855 - RNA, 19 nt, artificial
  RNA for silencing
cgagcagcgagagcaccaa

SEQ ID NO: 856 - RNA, 19 nt, artificial
  RNA for silencing
gagcagcgagagcaccaag

SEQ ID NO: 857 - RNA, 19 nt, artificial
  RNA for silencing
agcagcgagagcaccaagg

SEQ ID NO: 858 - RNA, 19 nt, artificial
  RNA for silencing
gcagcgagagcaccaaggg

SEQ ID NO: 859 - RNA, 19 nt, artificial
  RNA for silencing
cagcgagagcaccaaggga

SEQ ID NO: 860 - RNA, 19 nt, artificial
  RNA for silencing
agcgagagcaccaagggag

SEQ ID NO: 861 - RNA, 19 nt, artificial
  RNA for silencing
gcgagagcaccaagggaga

SEQ ID NO: 862 - RNA, 19 nt, artificial
  RNA for silencing
cgagagcaccaagggagac

SEQ ID NO: 863 - RNA, 19 nt, artificial
  RNA for silencing
gagagcaccaagggagacc

SEQ ID NO: 864 - RNA, 19 nt, artificial
  RNA for silencing
agagcaccaagggagaccu

SEQ ID NO: 865 - RNA, 19 nt, artificial
  RNA for silencing
gagcaccaagggagaccug

SEQ ID NO: 866 - RNA, 19 nt, artificial
  RNA for silencing
agcaccaagggagaccugg

SEQ ID NO: 867 - RNA, 19 nt, artificial
  RNA for silencing
gcaccaagggagaccugga

SEQ ID NO: 868 - RNA, 19 nt, artificial
  RNA for silencing
caccaagggagaccuggag

SEQ ID NO: 869 - RNA, 19 nt, artificial
  RNA for silencing
accaagggagaccuggagu

SEQ ID NO: 870 - RNA, 19 nt, artificial
  RNA for silencing
ccaagggagaccuggagug

SEQ ID NO: 871 - RNA, 19 nt, artificial
  RNA for silencing
caagggagaccuggagugc

SEQ ID NO: 872 - RNA, 19 nt, artificial
  RNA for silencing
aagggagaccuggagugcg

SEQ ID NO: 873 - RNA, 19 nt, artificial
  RNA for silencing
agggagaccuggagugcga

SEQ ID NO: 874 - RNA, 19 nt, artificial
  RNA for silencing
gggagaccuggagugcgag

SEQ ID NO: 875 - RNA, 19 nt, artificial
  RNA for silencing
ggagaccuggagugcgagc

SEQ ID NO: 876 - RNA, 19 nt, artificial
  RNA for silencing
gagaccuggagugcgagcc

SEQ ID NO: 877 - RNA, 19 nt, artificial
  RNA for silencing
agaccuggagugcgagccc

SEQ ID NO: 878 - RNA, 19 nt, artificial
  RNA for silencing
gaccuggagugcgagcccc

SEQ ID NO: 879 - RNA, 19 nt, artificial
  RNA for silencing
accuggagugcgagcccca

SEQ ID NO: 880 - RNA, 19 nt, artificial
  RNA for silencing
ccuggagugcgagccccac

SEQ ID NO: 881 - RNA, 19 nt, artificial
  RNA for silencing
cuggagugcgagccccacc

SEQ ID NO: 882 - RNA, 19 nt, artificial
  RNA for silencing
uggagugcgagccccacca

SEQ ID NO: 883 - RNA, 19 nt, artificial
  RNA for silencing
ggagugcgagccccaccaa

SEQ ID NO: 884 - RNA, 19 nt, artificial
  RNA for silencing
gagugcgagccccaccaag

SEQ ID NO: 885 - RNA, 19 nt, artificial
  RNA for silencing
agugcgagccccaccaaga

SEQ ID NO: 886 - RNA, 19 nt, artificial
  RNA for silencing
gugcgagccccaccaagag

SEQ ID NO: 887 - RNA, 19 nt, artificial
  RNA for silencing
ugcgagccccaccaagagc

SEQ ID NO: 888 - RNA, 19 nt, artificial
  RNA for silencing
gcgagccccaccaagagcc

SEQ ID NO: 889 - RNA, 19 nt, artificial
  RNA for silencing
cgagccccaccaagagccc

SEQ ID NO: 890 - RNA, 19 nt, artificial
  RNA for silencing
gagccccaccaagagcccg

SEQ ID NO: 891 - RNA, 19 nt, artificial
  RNA for silencing
agccccaccaagagcccgg

SEQ ID NO: 892 - RNA, 19 nt, artificial
  RNA for silencing
gccccaccaagagcccggc

SEQ ID NO: 893 - RNA, 19 nt, artificial
  RNA for silencing
ccccaccaagagcccggcg

SEQ ID NO: 894 - RNA, 19 nt, artificial
  RNA for silencing
cccaccaagagcccggcgc

SEQ ID NO: 895 - RNA, 19 nt, artificial
  RNA for silencing
ccaccaagagcccggcgcc

SEQ ID NO: 896 - RNA, 19 nt, artificial
  RNA for silencing
caccaagagcccggcgccu

SEQ ID NO: 897 - RNA, 19 nt, artificial
  RNA for silencing
accaagagcccggcgccuu

SEQ ID NO: 898 - RNA, 19 nt, artificial
  RNA for silencing
ccaagagcccggcgccuuc

SEQ ID NO: 899 - RNA, 19 nt, artificial
  RNA for silencing
caagagcccggcgccuucg

SEQ ID NO: 900 - RNA, 19 nt, artificial
  RNA for silencing
aagagcccggcgccuucgc

SEQ ID NO: 901 - RNA, 19 nt, artificial
  RNA for silencing
agagcccggcgccuucgcg

SEQ ID NO: 902 - RNA, 19 nt, artificial
  RNA for silencing
gagcccggcgccuucgcgg

SEQ ID NO: 903 - RNA, 19 nt, artificial
  RNA for silencing
agcccggcgccuucgcggu

SEQ ID NO: 904 - RNA, 19 nt, artificial
  RNA for silencing
gcccggcgccuucgcggug

SEQ ID NO: 905 - RNA, 19 nt, artificial
  RNA for silencing
cccggcgccuucgcgguga

SEQ ID NO: 906 - RNA, 19 nt, artificial
  RNA for silencing
ccggcgccuucgcggugag

SEQ ID NO: 907 - RNA, 19 nt, artificial
  RNA for silencing
cggcgccuucgcggugagc

SEQ ID NO: 908 - RNA, 19 nt, artificial
  RNA for silencing
ggcgccuucgcggugagcc

SEQ ID NO: 909 - RNA, 19 nt, artificial
  RNA for silencing
gcgccuucgcggugagccc

SEQ ID NO: 910 - RNA, 19 nt, artificial
  RNA for silencing
cgccuucgcggugagcccg

SEQ ID NO: 911 - RNA, 19 nt, artificial
  RNA for silencing
gccuucgcggugagcccgg

SEQ ID NO: 912 - RNA, 19 nt, artificial
  RNA for silencing
ccuucgcggugagcccggu

SEQ ID NO: 913 - RNA, 19 nt, artificial
  RNA for silencing
cuucgcggugagcccgguu

SEQ ID NO: 914 - RNA, 19 nt, artificial
  RNA for silencing
uucgcggugagcccgguuc

SEQ ID NO: 915 - RNA, 19 nt, artificial
  RNA for silencing
ucgcggugagcccgguucu

SEQ ID NO: 916 - RNA, 19 nt, artificial
  RNA for silencing
cgcggugagcccgguucuu

SEQ ID NO: 917 - RNA, 19 nt, artificial
  RNA for silencing
gcggugagcccgguucuug

SEQ ID NO: 918 - RNA, 19 nt, artificial
  RNA for silencing
cggugagcccgguucuuga

SEQ ID NO: 919 - RNA, 19 nt, artificial
  RNA for silencing
ggugagcccgguucuugag

SEQ ID NO: 920 - RNA, 19 nt, artificial
  RNA for silencing
gugagcccgguucuugagg

SEQ ID NO: 921 - RNA, 19 nt, artificial
  RNA for silencing
ugagcccgguucuugaggg

SEQ ID NO: 922 - RNA, 19 nt, artificial
  RNA for silencing
gagcccgguucuugagggc

SEQ ID NO: 923 - RNA, 19 nt, artificial
  RNA for silencing
agcccgguucuugagggcg

SEQ ID NO: 924 - RNA, 19 nt, artificial
  RNA for silencing
gcccgguucuugagggcga

SEQ ID NO: 925 - RNA, 19 nt, artificial
  RNA for silencing
cccgguucuugagggcgag

SEQ ID NO: 926 - RNA, 19 nt, artificial
  RNA for silencing
ccgguucuugagggcgagu

SEQ ID NO: 927 - RNA, 19 nt, artificial
  RNA for silencing
cgguucuugagggcgagua

SEQ ID NO: 928 - RNA, 19 nt, artificial
  RNA for silencing
gguucuugagggcgaguag

SEQ ID NO: 929 - RNA, 19 nt, artificial
  RNA for silencing
guucuugagggcgaguagg

SEQ ID NO: 930 - RNA, 19 nt, artificial
  RNA for silencing
uucuugagggcgaguaggc

SEQ ID NO: 931 - RNA, 19 nt, artificial
  RNA for silencing
ucuugagggcgaguaggcg

SEQ ID NO: 932 - RNA, 19 nt, artificial
  RNA for silencing
cuugagggcgaguaggcgc

SEQ ID NO: 933 - RNA, 19 nt, artificial
  RNA for silencing
uugagggcgaguaggcgcg

SEQ ID NO: 934 - RNA, 19 nt, artificial
  RNA for silencing
ugagggcgaguaggcgcgg

SEQ ID NO: 935 - RNA, 19 nt, artificial
  RNA for silencing
gagggcgaguaggcgcggc

SEQ ID NO: 936 - RNA, 19 nt, artificial
  RNA for silencing
agggcgaguaggcgcggcg

SEQ ID NO: 937 - RNA, 19 nt, artificial
  RNA for silencing
gggcgaguaggcgcggcgu

SEQ ID NO: 938 - RNA, 19 nt, artificial
  RNA for silencing
ggcgaguaggcgcggcguc

SEQ ID NO: 939 - RNA, 19 nt, artificial
  RNA for silencing
gcgaguaggcgcggcgucg

SEQ ID NO: 940 - RNA, 19 nt, artificial
  RNA for silencing
cgaguaggcgcggcgucgg

SEQ ID NO: 941 - RNA, 19 nt, artificial
  RNA for silencing
gaguaggcgcggcgucggg

SEQ ID NO: 942 - RNA, 19 nt, artificial
  RNA for silencing
aguaggcgcggcgucgggc

SEQ ID NO: 943 - RNA, 19 nt, artificial
  RNA for silencing
guaggcgcggcgucgggcg

SEQ ID NO: 944 - RNA, 19 nt, artificial
  RNA for silencing
uaggcgcggcgucgggcgg

SEQ ID NO: 945 - RNA, 19 nt, artificial
  RNA for silencing
aggcgcggcgucgggcggc

SEQ ID NO: 946 - RNA, 19 nt, artificial
  RNA for silencing
ggcgcggcgucgggcggcu

SEQ ID NO: 947 - RNA, 19 nt, artificial
  RNA for silencing
gcgcggcgucgggcggcug

SEQ ID NO: 948 - RNA, 19 nt, artificial
  RNA for silencing
cgcggcgucgggcggcugc

SEQ ID NO: 949 - RNA, 19 nt, artificial
  RNA for silencing
gcggcgucgggcggcugcu

SEQ ID NO: 950 - RNA, 19 nt, artificial
  RNA for silencing
cggcgucgggcggcugcug

SEQ ID NO: 951 - RNA, 19 nt, artificial
  RNA for silencing
ggcgucgggcggcugcugc

SEQ ID NO: 952 - RNA, 19 nt, artificial
  RNA for silencing
gcgucgggcggcugcugcg

SEQ ID NO: 953 - RNA, 19 nt, artificial
  RNA for silencing
cgucgggcggcugcugcgc

SEQ ID NO: 954 - RNA, 19 nt, artificial
  RNA for silencing
gucgggcggcugcugcgcg

SEQ ID NO: 955 - RNA, 19 nt, artificial
  RNA for silencing
ucgggcggcugcugcgcgg

SEQ ID NO: 956 - RNA, 19 nt, artificial
  RNA for silencing
cgggcggcugcugcgcggc

SEQ ID NO: 957 - RNA, 19 nt, artificial
  RNA for silencing
gggcggcugcugcgcggcg

SEQ ID NO: 958 - RNA, 19 nt, artificial
  RNA for silencing
ggcggcugcugcgcggcgu

SEQ ID NO: 959 - RNA, 19 nt, artificial
  RNA for silencing
gcggcugcugcgcggcguu

SEQ ID NO: 960 - RNA, 19 nt, artificial
  RNA for silencing
cggcugcugcgcggcguuc

SEQ ID NO: 961 - RNA, 19 nt, artificial
  RNA for silencing
ggcugcugcgcggcguuca

SEQ ID NO: 962 - RNA, 19 nt, artificial
  RNA for silencing
gcugcugcgcggcguucac

SEQ ID NO: 963 - RNA, 19 nt, artificial
  RNA for silencing
cugcugcgcggcguucacu

SEQ ID NO: 964 - RNA, 19 nt, artificial
  RNA for silencing
ugcugcgcggcguucacug

SEQ ID NO: 965 - RNA, 19 nt, artificial
  RNA for silencing
gcugcgcggcguucacugu

SEQ ID NO: 966 - RNA, 19 nt, artificial
  RNA for silencing
cugcgcggcguucacuguu

SEQ ID NO: 967 - RNA, 19 nt, artificial
  RNA for silencing
ugcgcggcguucacuguug

SEQ ID NO: 968 - RNA, 19 nt, artificial
  RNA for silencing
gcgcggcguucacuguugc

SEQ ID NO: 969 - RNA, 19 nt, artificial
  RNA for silencing
cgcggcguucacuguugcc

SEQ ID NO: 970 - RNA, 19 nt, artificial
  RNA for silencing
gcggcguucacuguugccu

SEQ ID NO: 971 - RNA, 19 nt, artificial
  RNA for silencing
cggcguucacuguugccuu

SEQ ID NO: 972 - RNA, 19 nt, artificial
  RNA for silencing
ggcguucacuguugccuug

SEQ ID NO: 973 - RNA, 19 nt, artificial
  RNA for silencing
gcguucacuguugccuugu

SEQ ID NO: 974 - RNA, 19 nt, artificial
  RNA for silencing
cguucacuguugccuuguu

SEQ ID NO: 975 - RNA, 19 nt, artificial
  RNA for silencing
guucacuguugccuuguuc

SEQ ID NO: 976 - RNA, 19 nt, artificial
  RNA for silencing
uucacuguugccuuguucu

SEQ ID NO: 977 - RNA, 19 nt, artificial
  RNA for silencing
ucacuguugccuuguucug

SEQ ID NO: 978 - RNA, 19 nt, artificial
  RNA for silencing
cacuguugccuuguucugu

SEQ ID NO: 979 - RNA, 19 nt, artificial
  RNA for silencing
acuguugccuuguucuguu

SEQ ID NO: 980 - RNA, 19 nt, artificial
  RNA for silencing
cuguugccuuguucuguug

SEQ ID NO: 981 - RNA, 19 nt, artificial
  RNA for silencing
uguugccuuguucuguugg

SEQ ID NO: 982 - RNA, 19 nt, artificial
  RNA for silencing
guugccuuguucuguuggg

SEQ ID NO: 983 - RNA, 19 nt, artificial
  RNA for silencing
uugccuuguucuguugggg

SEQ ID NO: 984 - RNA, 19 nt, artificial
  RNA for silencing
ugccuuguucuguuggggu

SEQ ID NO: 985 - RNA, 19 nt, artificial
  RNA for silencing
gccuuguucuguugggguu

SEQ ID NO: 986 - RNA, 19 nt, artificial
  RNA for silencing
ccuuguucuguugggguug

SEQ ID NO: 987 - RNA, 19 nt, artificial
  RNA for silencing
cuuguucuguugggguugc

SEQ ID NO: 988 - RNA, 19 nt, artificial
  RNA for silencing
uuguucuguugggguugcg

SEQ ID NO: 989 - RNA, 19 nt, artificial
  RNA for silencing
uguucuguugggguugcgg

SEQ ID NO: 990 - RNA, 19 nt, artificial
  RNA for silencing
guucuguugggguugcggg

SEQ ID NO: 991 - RNA, 19 nt, artificial
  RNA for silencing
uucuguugggguugcgggg

SEQ ID NO: 992 - RNA, 19 nt, artificial
  RNA for silencing
ucuguugggguugcggggg

SEQ ID NO: 993 - RNA, 19 nt, artificial
  RNA for silencing
cuguugggguugcgggggg

SEQ ID NO: 994 - RNA, 19 nt, artificial
  RNA for silencing
uguugggguugcggggggg

SEQ ID NO: 995 - RNA, 19 nt, artificial
  RNA for silencing
guugggguugcgggggggc

SEQ ID NO: 996 - RNA, 19 nt, artificial
  RNA for silencing
uugggguugcgggggggcg

SEQ ID NO: 997 - RNA, 19 nt, artificial
  RNA for silencing
ugggguugcgggggggcgu

SEQ ID NO: 998 - RNA, 19 nt, artificial
  RNA for silencing
gggguugcgggggggcguu

SEQ ID NO: 999 - RNA, 19 nt, artificial
  RNA for silencing
ggguugcgggggggcguug

SEQ ID NO: 1000 - RNA, 19 nt, artificial
  RNA for silencing
gguugcgggggggcguugg

SEQ ID NO: 1001 - RNA, 19 nt, artificial
  RNA for silencing
guugcgggggggcguuggg

SEQ ID NO: 1002 - RNA, 19 nt, artificial
  RNA for silencing
uugcgggggggcguugggu

SEQ ID NO: 1003 - RNA, 19 nt, artificial
  RNA for silencing
ugcgggggggcguuggguu

SEQ ID NO: 1004 - RNA, 19 nt, artificial
  RNA for silencing
gcgggggggcguuggguuu

SEQ ID NO: 1005 - RNA, 19 nt, artificial
  RNA for silencing
cgggggggcguuggguuuc

SEQ ID NO: 1006 - RNA, 19 nt, artificial
  RNA for silencing
gggggggcguuggguuucu

SEQ ID NO: 1007 - RNA, 19 nt, artificial
  RNA for silencing
ggggggcguuggguuucuu

SEQ ID NO: 1008 - RNA, 19 nt, artificial
  RNA for silencing
gggggcguuggguuucuuc

SEQ ID NO: 1009 - RNA, 19 nt, artificial
  RNA for silencing
ggggcguuggguuucuucu

SEQ ID NO: 1010 - RNA, 19 nt, artificial
  RNA for silencing
gggcguuggguuucuucuu

SEQ ID NO: 1011 - RNA, 19 nt, artificial
  RNA for silencing
ggcguuggguuucuucuuu

SEQ ID NO: 1012 - RNA, 19 nt, artificial
  RNA for silencing
gcguuggguuucuucuuuc

SEQ ID NO: 1013 - RNA, 19 nt, artificial
  RNA for silencing
cguuggguuucuucuuucc

SEQ ID NO: 1014 - RNA, 19 nt, artificial
  RNA for silencing
guuggguuucuucuuuccg

SEQ ID NO: 1015 - RNA, 19 nt, artificial
  RNA for silencing
uuggguuucuucuuuccgg

SEQ ID NO: 1016 - RNA, 19 nt, artificial
  RNA for silencing
uggguuucuucuuuccggg

SEQ ID NO: 1017 - RNA, 19 nt, artificial
  RNA for silencing
ggguuucuucuuuccgggg

SEQ ID NO: 1018 - RNA, 19 nt, artificial
  RNA for silencing
gguuucuucuuuccggggc

SEQ ID NO: 1019 - RNA, 19 nt, artificial
  RNA for silencing
guuucuucuuuccggggcg

SEQ ID NO: 1020 - RNA, 19 nt, artificial
  RNA for silencing
uuucuucuuuccggggcgg

SEQ ID NO: 1021 - RNA, 19 nt, artificial
  RNA for silencing
uucuucuuuccggggcggg

SEQ ID NO: 1022 - RNA, 19 nt, artificial
  RNA for silencing
ucuucuuuccggggcgggg

SEQ ID NO: 1023 - RNA, 19 nt, artificial
  RNA for silencing
cuucuuuccggggcggggg

SEQ ID NO: 1024 - RNA, 19 nt, artificial
  RNA for silencing
uucuuuccggggcgggggg

SEQ ID NO: 1025 - RNA, 19 nt, artificial
  RNA for silencing
ucuuuccggggcggggggg

SEQ ID NO: 1026 - RNA, 19 nt, artificial
  RNA for silencing
cuuuccggggcgggggggg

SEQ ID NO: 1027 - RNA, 19 nt, artificial
  RNA for silencing
uuuccggggcggggggggc

SEQ ID NO: 1028 - RNA, 19 nt, artificial
  RNA for silencing
uuccggggcggggggggca

SEQ ID NO: 1029 - RNA, 19 nt, artificial
  RNA for silencing
uccggggcggggggggcac

SEQ ID NO: 1030 - RNA, 19 nt, artificial
  RNA for silencing
ccggggcggggggggcacg

SEQ ID NO: 1031 - RNA, 19 nt, artificial
  RNA for silencing
cggggcggggggggcacgg

SEQ ID NO: 1032 - RNA, 19 nt, artificial
  RNA for silencing
ggggcggggggggcacggc

SEQ ID NO: 1033 - RNA, 19 nt, artificial
  RNA for silencing
gggcggggggggcacggcg

SEQ ID NO: 1034 - RNA, 19 nt, artificial
  RNA for silencing
ggcggggggggcacggcgg

SEQ ID NO: 1035 - RNA, 19 nt, artificial
  RNA for silencing
gcggggggggcacggcggg

SEQ ID NO: 1036 - RNA, 19 nt, artificial
  RNA for silencing
cggggggggcacggcgggg

SEQ ID NO: 1037 - RNA, 19 nt, artificial
  RNA for silencing
ggggggggcacggcggggc

SEQ ID NO: 1038 - RNA, 19 nt, artificial
  RNA for silencing
gggggggcacggcggggcc

SEQ ID NO: 1039 - RNA, 19 nt, artificial
  RNA for silencing
ggggggcacggcggggccg

SEQ ID NO: 1040 - RNA, 19 nt, artificial
  RNA for silencing
gggggcacggcggggccgc

SEQ ID NO: 1041 - RNA, 19 nt, artificial
  RNA for silencing
ggggcacggcggggccgcg

SEQ ID NO: 1042 - RNA, 19 nt, artificial
  RNA for silencing
gggcacggcggggccgcgg

SEQ ID NO: 1043 - RNA, 19 nt, artificial
  RNA for silencing
ggcacggcggggccgcggc

SEQ ID NO: 1044 - RNA, 19 nt, artificial
  RNA for silencing
gcacggcggggccgcggcc

SEQ ID NO: 1045 - RNA, 19 nt, artificial
  RNA for silencing
cacggcggggccgcggccg

SEQ ID NO: 1046 - RNA, 19 nt, artificial
  RNA for silencing
acggcggggccgcggccgg

SEQ ID NO: 1047 - RNA, 19 nt, artificial
  RNA for silencing
cggcggggccgcggccggg

SEQ ID NO: 1048 - RNA, 19 nt, artificial
  RNA for silencing
ggcggggccgcggccgggc

SEQ ID NO: 1049 - RNA, 19 nt, artificial
  RNA for silencing
gcggggccgcggccgggcc

SEQ ID NO: 1050 - RNA, 19 nt, artificial
  RNA for silencing
cggggccgcggccgggccg

SEQ ID NO: 1051 - RNA, 19 nt, artificial
  RNA for silencing
ggggccgcggccgggccgg

SEQ ID NO: 1052 - RNA, 19 nt, artificial
  RNA for silencing
gggccgcggccgggccggc

SEQ ID NO: 1053 - RNA, 19 nt, artificial
  RNA for silencing
ggccgcggccgggccggcg

SEQ ID NO: 1054 - RNA, 19 nt, artificial
  RNA for silencing
gccgcggccgggccggcgg

SEQ ID NO: 1055 - RNA, 19 nt, artificial
  RNA for silencing
ccgcggccgggccggcggg

SEQ ID NO: 1056 - RNA, 19 nt, artificial
  RNA for silencing
cgcggccgggccggcgggg

SEQ ID NO: 1057 - RNA, 19 nt, artificial
  RNA for silencing
gcggccgggccggcggggc

SEQ ID NO: 1058 - RNA, 19 nt, artificial
  RNA for silencing
cggccgggccggcggggcg

SEQ ID NO: 1059 - RNA, 19 nt, artificial
  RNA for silencing
ggccgggccggcggggcgg

SEQ ID NO: 1060 - RNA, 19 nt, artificial
  RNA for silencing
gccgggccggcggggcggg

SEQ ID NO: 1061 - RNA, 19 nt, artificial
  RNA for silencing
ccgggccggcggggcgggg

SEQ ID NO: 1062 - RNA, 19 nt, artificial
  RNA for silencing
cgggccggcggggcggggc

SEQ ID NO: 1063 - RNA, 19 nt, artificial
  RNA for silencing
gggccggcggggcggggcg

SEQ ID NO: 1064 - RNA, 19 nt, artificial
  RNA for silencing
ggccggcggggcggggcgg

SEQ ID NO: 1065 - RNA, 19 nt, artificial
  RNA for silencing
gccggcggggcggggcggg

SEQ ID NO: 1066 - RNA, 19 nt, artificial
  RNA for silencing
ccggcggggcggggcgggg

SEQ ID NO: 1067 - RNA, 19 nt, artificial
  RNA for silencing
cggcggggcggggcggggc

SEQ ID NO: 1068 - RNA, 19 nt, artificial
  RNA for silencing
ggcggggcggggcggggcg

SEQ ID NO: 1069 - RNA, 19 nt, artificial
  RNA for silencing
gcggggcggggcggggcgg

SEQ ID NO: 1070 - RNA, 19 nt, artificial
  RNA for silencing
cggggcggggcggggcggg

SEQ ID NO: 1071 - RNA, 19 nt, artificial
  RNA for silencing
ggggcggggcggggcggga

SEQ ID NO: 1072 - RNA, 19 nt, artificial
  RNA for silencing
gggcggggcggggcgggac

SEQ ID NO: 1073 - RNA, 19 nt, artificial
  RNA for silencing
ggcggggcggggcgggacg

SEQ ID NO: 1074 - RNA, 19 nt, artificial
  RNA for silencing
gcggggcggggcgggacgg

SEQ ID NO: 1075 - RNA, 19 nt, artificial
  RNA for silencing
cggggcggggcgggacggg

SEQ ID NO: 1076 - RNA, 19 nt, artificial
  RNA for silencing
ggggcggggcgggacgggg

SEQ ID NO: 1077 - RNA, 19 nt, artificial
  RNA for silencing
gggcggggcgggacggggc

SEQ ID NO: 1078 - RNA, 19 nt, artificial
  RNA for silencing
ggcggggcgggacggggcg

SEQ ID NO: 1079 - RNA, 19 nt, artificial
  RNA for silencing
gcggggcgggacggggcgg

SEQ ID NO: 1080 - RNA, 19 nt, artificial
  RNA for silencing
cggggcgggacggggcggg

SEQ ID NO: 1081 - RNA, 19 nt, artificial
  RNA for silencing
ggggcgggacggggcgggg

SEQ ID NO: 1082 - RNA, 19 nt, artificial
  RNA for silencing
gggcgggacggggcggggc

SEQ ID NO: 1083 - RNA, 19 nt, artificial
  RNA for silencing
ggcgggacggggcggggcg

SEQ ID NO: 1084 - RNA, 19 nt, artificial
  RNA for silencing
gcgggacggggcggggcgg

SEQ ID NO: 1085 - RNA, 19 nt, artificial
  RNA for silencing
cgggacggggcggggcgga

SEQ ID NO: 1086 - RNA, 19 nt, artificial
  RNA for silencing
gggacggggcggggcggag

SEQ ID NO: 1087 - RNA, 19 nt, artificial
  RNA for silencing
ggacggggcggggcggagc

SEQ ID NO: 1088 - RNA, 19 nt, artificial
  RNA for silencing
gacggggcggggcggagcc

SEQ ID NO: 1089 - RNA, 19 nt, artificial
  RNA for silencing
acggggcggggcggagccg

SEQ ID NO: 1090 - RNA, 19 nt, artificial
  RNA for silencing
cggggcggggcggagccgc

SEQ ID NO: 1091 - RNA, 19 nt, artificial
  RNA for silencing
ggggcggggcggagccgcg

SEQ ID NO: 1092 - RNA, 19 nt, artificial
  RNA for silencing
gggcggggcggagccgcgc

SEQ ID NO: 1093 - RNA, 19 nt, artificial
  RNA for silencing
ggcggggcggagccgcgcg

SEQ ID NO: 1094 - RNA, 19 nt, artificial
  RNA for silencing
gcggggcggagccgcgcgg

SEQ ID NO: 1095 - RNA, 19 nt, artificial
  RNA for silencing
cggggcggagccgcgcggg

SEQ ID NO: 1096 - RNA, 19 nt, artificial
  RNA for silencing
ggggcggagccgcgcgggg

SEQ ID NO: 1097 - RNA, 19 nt, artificial
  RNA for silencing
gggcggagccgcgcggggg

SEQ ID NO: 1098 - RNA, 19 nt, artificial
  RNA for silencing
ggcggagccgcgcgggggc

SEQ ID NO: 1099 - RNA, 19 nt, artificial
  RNA for silencing
gcggagccgcgcgggggcc

SEQ ID NO: 1100 - RNA, 19 nt, artificial
  RNA for silencing
cggagccgcgcgggggccg

SEQ ID NO: 1101 - RNA, 19 nt, artificial
  RNA for silencing
ggagccgcgcgggggccgc

SEQ ID NO: 1102 - RNA, 19 nt, artificial
  RNA for silencing
gagccgcgcgggggccgca

SEQ ID NO: 1103 - RNA, 19 nt, artificial
  RNA for silencing
agccgcgcgggggccgcag

SEQ ID NO: 1104 - RNA, 19 nt, artificial
  RNA for silencing
gccgcgcgggggccgcagu

SEQ ID NO: 1105 - RNA, 19 nt, artificial
  RNA for silencing
ccgcgcgggggccgcaguc

SEQ ID NO: 1106 - RNA, 19 nt, artificial
  RNA for silencing
cgcgcgggggccgcagucc

SEQ ID NO: 1107 - RNA, 19 nt, artificial
  RNA for silencing
gcgcgggggccgcaguccg

SEQ ID NO: 1108 - RNA, 19 nt, artificial
  RNA for silencing
cgcgggggccgcaguccgg

SEQ ID NO: 1109 - RNA, 19 nt, artificial
  RNA for silencing
gcgggggccgcaguccggg

SEQ ID NO: 1110 - RNA, 19 nt, artificial
  RNA for silencing
cgggggccgcaguccgggc

SEQ ID NO: 1111 - RNA, 19 nt, artificial
  RNA for silencing
gggggccgcaguccgggcc

SEQ ID NO: 1112 - RNA, 19 nt, artificial
  RNA for silencing
ggggccgcaguccgggccg

SEQ ID NO: 1113 - RNA, 19 nt, artificial
  RNA for silencing
gggccgcaguccgggccgg

SEQ ID NO: 1114 - RNA, 19 nt, artificial
  RNA for silencing
ggccgcaguccgggccggg

SEQ ID NO: 1115 - RNA, 19 nt, artificial
  RNA for silencing
gccgcaguccgggccgggg

SEQ ID NO: 1116 - RNA, 19 nt, artificial
  RNA for silencing
ccgcaguccgggccggggc

SEQ ID NO: 1117 - RNA, 19 nt, artificial
  RNA for silencing
cgcaguccgggccggggcc

SEQ ID NO: 1118 - RNA, 19 nt, artificial
  RNA for silencing
gcaguccgggccggggccg

SEQ ID NO: 1119 - RNA, 19 nt, artificial
  RNA for silencing
caguccgggccggggccgc

SEQ ID NO: 1120 - RNA, 19 nt, artificial
  RNA for silencing
aguccgggccggggccgcc

SEQ ID NO: 1121 - RNA, 19 nt, artificial
  RNA for silencing
guccgggccggggccgccg

SEQ ID NO: 1122 - RNA, 19 nt, artificial
  RNA for silencing
uccgggccggggccgccgu

SEQ ID NO: 1123 - RNA, 19 nt, artificial
  RNA for silencing
ccgggccggggccgccguc

SEQ ID NO: 1124 - RNA, 19 nt, artificial
  RNA for silencing
cgggccggggccgccgucg

SEQ ID NO: 1125 - RNA, 19 nt, artificial
  RNA for silencing
gggccggggccgccgucgg

SEQ ID NO: 1126 - RNA, 19 nt, artificial
  RNA for silencing
ggccggggccgccgucggg

SEQ ID NO: 1127 - RNA, 19 nt, artificial
  RNA for silencing
gccggggccgccgucgggu

SEQ ID NO: 1128 - RNA, 19 nt, artificial
  RNA for silencing
ccggggccgccgucggguc

SEQ ID NO: 1129 - RNA, 19 nt, artificial
  RNA for silencing
cggggccgccgucgggucu

SEQ ID NO: 1130 - RNA, 19 nt, artificial
  RNA for silencing
ggggccgccgucgggucuc

SEQ ID NO: 1131 - RNA, 19 nt, artificial
  RNA for silencing
gggccgccgucgggucucg

SEQ ID NO: 1132 - RNA, 19 nt, artificial
  RNA for silencing
ggccgccgucgggucucgg

SEQ ID NO: 1133 - RNA, 19 nt, artificial
  RNA for silencing
gccgccgucgggucucggc

SEQ ID NO: 1134 - RNA, 19 nt, artificial
  RNA for silencing
ccgccgucgggucucggcc

SEQ ID NO: 1135 - RNA, 19 nt, artificial
  RNA for silencing
cgccgucgggucucggccc

SEQ ID NO: 1136 - RNA, 19 nt, artificial
  RNA for silencing
gccgucgggucucggcccg

SEQ ID NO: 1137 - RNA, 19 nt, artificial
  RNA for silencing
ccgucgggucucggcccgc

SEQ ID NO: 1138 - RNA, 19 nt, artificial
  RNA for silencing
cgucgggucucggcccgcu

SEQ ID NO: 1139 - RNA, 19 nt, artificial
  RNA for silencing
gucgggucucggcccgcuc

SEQ ID NO: 1140 - RNA, 19 nt, artificial
  RNA for silencing
ucgggucucggcccgcucc

SEQ ID NO: 1141 - RNA, 19 nt, artificial
  RNA for silencing
cgggucucggcccgcuccc

SEQ ID NO: 1142 - RNA, 19 nt, artificial
  RNA for silencing
gggucucggcccgcucccg

SEQ ID NO: 1143 - RNA, 19 nt, artificial
  RNA for silencing
ggucucggcccgcucccgu

SEQ ID NO: 1144 - RNA, 19 nt, artificial
  RNA for silencing
gucucggcccgcucccguc

SEQ ID NO: 1145 - RNA, 19 nt, artificial
  RNA for silencing
ucucggcccgcucccgucg

SEQ ID NO: 1146 - RNA, 19 nt, artificial
  RNA for silencing
cucggcccgcucccgucgg

SEQ ID NO: 1147 - RNA, 19 nt, artificial
  RNA for silencing
ucggcccgcucccgucggg

SEQ ID NO: 1148 - RNA, 19 nt, artificial
  RNA for silencing
cggcccgcucccgucgggg

SEQ ID NO: 1149 - RNA, 19 nt, artificial
  RNA for silencing
ggcccgcucccgucggggc

SEQ ID NO: 1150 - RNA, 19 nt, artificial
  RNA for silencing
gcccgcucccgucggggcg

SEQ ID NO: 1151 - RNA, 19 nt, artificial
  RNA for silencing
cccgcucccgucggggcgg

SEQ ID NO: 1152 - RNA, 19 nt, artificial
  RNA for silencing
ccgcucccgucggggcgga

SEQ ID NO: 1153 - RNA, 19 nt, artificial
  RNA for silencing
cgcucccgucggggcggag

SEQ ID NO: 1154 - RNA, 19 nt, artificial
  RNA for silencing
gcucccgucggggcggagc

SEQ ID NO: 1155 - RNA, 19 nt, artificial
  RNA for silencing
cucccgucggggcggagcg

SEQ ID NO: 1156 - RNA, 19 nt, artificial
  RNA for silencing
ucccgucggggcggagcgu

SEQ ID NO: 1157 - RNA, 19 nt, artificial
  RNA for silencing
cccgucggggcggagcguc

SEQ ID NO: 1158 - RNA, 19 nt, artificial
  RNA for silencing
ccgucggggcggagcgucc

SEQ ID NO: 1159 - RNA, 19 nt, artificial
  RNA for silencing
cgucggggcggagcguccg

SEQ ID NO: 1160 - RNA, 19 nt, artificial
  RNA for silencing
gucggggcggagcguccga

SEQ ID NO: 1161 - RNA, 19 nt, artificial
  RNA for silencing
ucggggcggagcguccgac

SEQ ID NO: 1162 - RNA, 19 nt, artificial
  RNA for silencing
cggggcggagcguccgacg

SEQ ID NO: 1163 - RNA, 19 nt, artificial
  RNA for silencing
ggggcggagcguccgacga

SEQ ID NO: 1164 - RNA, 19 nt, artificial
  RNA for silencing
gggcggagcguccgacgau

SEQ ID NO: 1165 - RNA, 19 nt, artificial
  RNA for silencing
ggcggagcguccgacgauc

SEQ ID NO: 1166 - RNA, 19 nt, artificial
  RNA for silencing
gcggagcguccgacgaucg

SEQ ID NO: 1167 - RNA, 19 nt, artificial
  RNA for silencing
cggagcguccgacgaucgg

SEQ ID NO: 1168 - RNA, 19 nt, artificial
  RNA for silencing
ggagcguccgacgaucggc

SEQ ID NO: 1169 - RNA, 19 nt, artificial
  RNA for silencing
gagcguccgacgaucggcc

SEQ ID NO: 1170 - RNA, 19 nt, artificial
  RNA for silencing
agcguccgacgaucggccu

SEQ ID NO: 1171 - RNA, 19 nt, artificial
  RNA for silencing
gcguccgacgaucggccuc

SEQ ID NO: 1172 - RNA, 19 nt, artificial
  RNA for silencing
cguccgacgaucggccucc

SEQ ID NO: 1173 - RNA, 19 nt, artificial
  RNA for silencing
guccgacgaucggccucca

SEQ ID NO: 1174 - RNA, 19 nt, artificial
  RNA for silencing
uccgacgaucggccuccac

SEQ ID NO: 1175 - RNA, 19 nt, artificial
  RNA for silencing
ccgacgaucggccuccacg

SEQ ID NO: 1176 - RNA, 19 nt, artificial
  RNA for silencing
cgacgaucggccuccacga

SEQ ID NO: 1177 - RNA, 19 nt, artificial
  RNA for silencing
gacgaucggccuccacgaa

SEQ ID NO: 1178 - RNA, 19 nt, artificial
  RNA for silencing
acgaucggccuccacgaaa

SEQ ID NO: 1179 - RNA, 19 nt, artificial
  RNA for silencing
cgaucggccuccacgaaac

SEQ ID NO: 1180 - RNA, 19 nt, artificial
  RNA for silencing
gaucggccuccacgaaacg

SEQ ID NO: 1181 - RNA, 19 nt, artificial
  RNA for silencing
aucggccuccacgaaacgc

SEQ ID NO: 1182 - RNA, 19 nt, artificial
  RNA for silencing
ucggccuccacgaaacgcg

SEQ ID NO: 1183 - RNA, 19 nt, artificial
  RNA for silencing
cggccuccacgaaacgcgg

SEQ ID NO: 1184 - RNA, 19 nt, artificial
  RNA for silencing
ggccuccacgaaacgcggu

SEQ ID NO: 1185 - RNA, 19 nt, artificial
  RNA for silencing
gccuccacgaaacgcggug

SEQ ID NO: 1186 - RNA, 19 nt, artificial
  RNA for silencing
ccuccacgaaacgcggugc

SEQ ID NO: 1187 - RNA, 19 nt, artificial
  RNA for silencing
cuccacgaaacgcggugcc

SEQ ID NO: 1188 - RNA, 19 nt, artificial
  RNA for silencing
uccacgaaacgcggugccg

SEQ ID NO: 1189 - RNA, 19 nt, artificial
  RNA for silencing
ccacgaaacgcggugccgu

SEQ ID NO: 1190 - RNA, 19 nt, artificial
  RNA for silencing
cacgaaacgcggugccgug

SEQ ID NO: 1191 - RNA, 19 nt, artificial
  RNA for silencing
acgaaacgcggugccguga

SEQ ID NO: 1192 - RNA, 19 nt, artificial
  RNA for silencing
cgaaacgcggugccgugau

SEQ ID NO: 1193 - RNA, 19 nt, artificial
  RNA for silencing
gaaacgcggugccgugaug

SEQ ID NO: 1194 - RNA, 19 nt, artificial
  RNA for silencing
aaacgcggugccgugaugu

SEQ ID NO: 1195 - RNA, 19 nt, artificial
  RNA for silencing
aacgcggugccgugaugug

SEQ ID NO: 1196 - RNA, 19 nt, artificial
  RNA for silencing
acgcggugccgugaugugu

SEQ ID NO: 1197 - RNA, 19 nt, artificial
  RNA for silencing
cgcggugccgugauguguu

SEQ ID NO: 1198 - RNA, 19 nt, artificial
  RNA for silencing
gcggugccgugauguguuu

SEQ ID NO: 1199 - RNA, 19 nt, artificial
  RNA for silencing
cggugccgugauguguuug

SEQ ID NO: 1200 - RNA, 19 nt, artificial
  RNA for silencing
ggugccgugauguguuugu

SEQ ID NO: 1201 - RNA, 19 nt, artificial
  RNA for silencing
gugccgugauguguuugua

SEQ ID NO: 1202 - RNA, 19 nt, artificial
  RNA for silencing
ugccgugauguguuuguag

SEQ ID NO: 1203 - RNA, 19 nt, artificial
  RNA for silencing
gccgugauguguuuguagu

SEQ ID NO: 1204 - RNA, 19 nt, artificial
  RNA for silencing
ccgugauguguuuguagug

SEQ ID NO: 1205 - RNA, 19 nt, artificial
  RNA for silencing
cgugauguguuuguagugg

SEQ ID NO: 1206 - RNA, 19 nt, artificial
  RNA for silencing
gugauguguuuguaguggu

SEQ ID NO: 1207 - RNA, 19 nt, artificial
  RNA for silencing
ugauguguuuguagugguu

SEQ ID NO: 1208 - RNA, 19 nt, artificial
  RNA for silencing
gauguguuuguagugguuc

SEQ ID NO: 1209 - RNA, 19 nt, artificial
  RNA for silencing
auguguuuguagugguucc

SEQ ID NO: 1210 - RNA, 19 nt, artificial
  RNA for silencing
uguguuuguagugguuccu

SEQ ID NO: 1211 - RNA, 19 nt, artificial
  RNA for silencing
guguuuguagugguuccuc

SEQ ID NO: 1212 - RNA, 19 nt, artificial
  RNA for silencing
uguuuguagugguuccucg

SEQ ID NO: 1213 - RNA, 19 nt, artificial
  RNA for silencing
guuuguagugguuccucgu

SEQ ID NO: 1214 - RNA, 19 nt, artificial
  RNA for silencing
uuuguagugguuccucgua

SEQ ID NO: 1215 - RNA, 19 nt, artificial
  RNA for silencing
uuguagugguuccucguag

SEQ ID NO: 1216 - RNA, 19 nt, artificial
  RNA for silencing
uguagugguuccucguagg

SEQ ID NO: 1217 - RNA, 19 nt, artificial
  RNA for silencing
guagugguuccucguaggc

SEQ ID NO: 1218 - RNA, 19 nt, artificial
  RNA for silencing
uagugguuccucguaggcu

SEQ ID NO: 1219 - RNA, 19 nt, artificial
  RNA for silencing
agugguuccucguaggcuc

SEQ ID NO: 1220 - RNA, 19 nt, artificial
  RNA for silencing
gugguuccucguaggcucc

SEQ ID NO: 1221 - RNA, 19 nt, artificial
  RNA for silencing
ugguuccucguaggcucca

SEQ ID NO: 1222 - RNA, 19 nt, artificial
  RNA for silencing
gguuccucguaggcuccag

SEQ ID NO: 1223 - RNA, 19 nt, artificial
  RNA for silencing
guuccucguaggcuccaga

SEQ ID NO: 1224 - RNA, 19 nt, artificial
  RNA for silencing
uuccucguaggcuccagac

SEQ ID NO: 1225 - RNA, 19 nt, artificial
  RNA for silencing
uccucguaggcuccagacg

SEQ ID NO: 1226 - RNA, 19 nt, artificial
  RNA for silencing
ccucguaggcuccagacgu

SEQ ID NO: 1227 - RNA, 19 nt, artificial
  RNA for silencing
cucguaggcuccagacguu

SEQ ID NO: 1228 - RNA, 19 nt, artificial
  RNA for silencing
ucguaggcuccagacguuu

SEQ ID NO: 1229 - RNA, 19 nt, artificial
  RNA for silencing
cguaggcuccagacguuuu

SEQ ID NO: 1230 - RNA, 19 nt, artificial
  RNA for silencing
guaggcuccagacguuuuc

SEQ ID NO: 1231 - RNA, 19 nt, artificial
  RNA for silencing
uaggcuccagacguuuucu

SEQ ID NO: 1232 - RNA, 19 nt, artificial
  RNA for silencing
aggcuccagacguuuucuc

SEQ ID NO: 1233 - RNA, 19 nt, artificial
  RNA for silencing
ggcuccagacguuuucucc

SEQ ID NO: 1234 - RNA, 19 nt, artificial
  RNA for silencing
gcuccagacguuuucuccu

SEQ ID NO: 1235 - RNA, 19 nt, artificial
  RNA for silencing
cuccagacguuuucuccuc

SEQ ID NO: 1236 - RNA, 19 nt, artificial
  RNA for silencing
uccagacguuuucuccucg

SEQ ID NO: 1237 - RNA, 19 nt, artificial
  RNA for silencing
ccagacguuuucuccucgu

SEQ ID NO: 1238 - RNA, 19 nt, artificial
  RNA for silencing
cagacguuuucuccucgua

SEQ ID NO: 1239 - RNA, 19 nt, artificial
  RNA for silencing
agacguuuucuccucguau

SEQ ID NO: 1240 - RNA, 19 nt, artificial
  RNA for silencing
gacguuuucuccucguauc

SEQ ID NO: 1241 - RNA, 19 nt, artificial
  RNA for silencing
acguuuucuccucguaucg

SEQ ID NO: 1242 - RNA, 19 nt, artificial
  RNA for silencing
cguuuucuccucguaucgc

SEQ ID NO: 1243 - RNA, 19 nt, artificial
  RNA for silencing
guuuucuccucguaucgcc

SEQ ID NO: 1244 - RNA, 19 nt, artificial
  RNA for silencing
uuuucuccucguaucgcca

SEQ ID NO: 1245 - RNA, 19 nt, artificial
  RNA for silencing
uuucuccucguaucgccaa

SEQ ID NO: 1246 - RNA, 19 nt, artificial
  RNA for silencing
uucuccucguaucgccaaa

SEQ ID NO: 1247 - RNA, 19 nt, artificial
  RNA for silencing
ucuccucguaucgccaaau

SEQ ID NO: 1248 - RNA, 19 nt, artificial
  RNA for silencing
cuccucguaucgccaaauu

SEQ ID NO: 1249 - RNA, 19 nt, artificial
  RNA for silencing
uccucguaucgccaaauua

SEQ ID NO: 1250 - RNA, 19 nt, artificial
  RNA for silencing
ccucguaucgccaaauuaa

SEQ ID NO: 1251 - RNA, 19 nt, artificial
  RNA for silencing
cucguaucgccaaauuaac

SEQ ID NO: 1252 - RNA, 19 nt, artificial
  RNA for silencing
ucguaucgccaaauuaacg

SEQ ID NO: 1253 - RNA, 19 nt, artificial
  RNA for silencing
cguaucgccaaauuaacgc

SEQ ID NO: 1254 - RNA, 19 nt, artificial
  RNA for silencing
guaucgccaaauuaacgcg

SEQ ID NO: 1255 - RNA, 19 nt, artificial
  RNA for silencing
uaucgccaaauuaacgcgu

SEQ ID NO: 1256 - RNA, 19 nt, artificial
  RNA for silencing
aucgccaaauuaacgcguu

SEQ ID NO: 1257 - RNA, 19 nt, artificial
  RNA for silencing
ucgccaaauuaacgcguuu

SEQ ID NO: 1258 - RNA, 19 nt, artificial
  RNA for silencing
cgccaaauuaacgcguuuu

SEQ ID NO: 1259 - RNA, 19 nt, artificial
  RNA for silencing
gccaaauuaacgcguuuug

SEQ ID NO: 1260 - RNA, 19 nt, artificial
  RNA for silencing
ccaaauuaacgcguuuugc

SEQ ID NO: 1261 - RNA, 19 nt, artificial
  RNA for silencing
caaauuaacgcguuuugca

SEQ ID NO: 1262 - RNA, 19 nt, artificial
  RNA for silencing
aaauuaacgcguuuugcau

SEQ ID NO: 1263 - RNA, 19 nt, artificial
  RNA for silencing
aauuaacgcguuuugcaua

SEQ ID NO: 1264 - RNA, 19 nt, artificial
  RNA for silencing
auuaacgcguuuugcauau

SEQ ID NO: 1265 - RNA, 19 nt, artificial
  RNA for silencing
uuaacgcguuuugcauauu

SEQ ID NO: 1266 - RNA, 19 nt, artificial
  RNA for silencing
uaacgcguuuugcauauua

SEQ ID NO: 1267 - RNA, 19 nt, artificial
  RNA for silencing
aacgcguuuugcauauuac

SEQ ID NO: 1268 - RNA, 19 nt, artificial
  RNA for silencing
acgcguuuugcauauuaca

SEQ ID NO: 1269 - RNA, 19 nt, artificial
  RNA for silencing
cgcguuuugcauauuacag

SEQ ID NO: 1270 - RNA, 19 nt, artificial
  RNA for silencing
gcguuuugcauauuacagu

SEQ ID NO: 1271 - RNA, 19 nt, artificial
  RNA for silencing
cguuuugcauauuacaguu

SEQ ID NO: 1272 - RNA, 19 nt, artificial
  RNA for silencing
guuuugcauauuacaguug

SEQ ID NO: 1273 - RNA, 19 nt, artificial
  RNA for silencing
uuuugcauauuacaguuga

SEQ ID NO: 1274 - RNA, 19 nt, artificial
  RNA for silencing
uuugcauauuacaguugag

SEQ ID NO: 1275 - RNA, 19 nt, artificial
  RNA for silencing
uugcauauuacaguugagu

SEQ ID NO: 1276 - RNA, 19 nt, artificial
  RNA for silencing
ugcauauuacaguugagug

SEQ ID NO: 1277 - RNA, 19 nt, artificial
  RNA for silencing
gcauauuacaguugagugc

SEQ ID NO: 1278 - RNA, 19 nt, artificial
  RNA for silencing
cauauuacaguugagugcc

SEQ ID NO: 1279 - RNA, 19 nt, artificial
  RNA for silencing
auauuacaguugagugccu

SEQ ID NO: 1280 - RNA, 19 nt, artificial
  RNA for silencing
uauuacaguugagugccuc

SEQ ID NO: 1281 - RNA, 19 nt, artificial
  RNA for silencing
auuacaguugagugccucg

SEQ ID NO: 1282 - RNA, 19 nt, artificial
  RNA for silencing
uuacaguugagugccucga

SEQ ID NO: 1283 - RNA, 19 nt, artificial
  RNA for silencing
uacaguugagugccucgac

SEQ ID NO: 1284 - RNA, 19 nt, artificial
  RNA for silencing
acaguugagugccucgacu

SEQ ID NO: 1285 - RNA, 19 nt, artificial
  RNA for silencing
caguugagugccucgacuu

SEQ ID NO: 1286 - RNA, 19 nt, artificial
  RNA for silencing
aguugagugccucgacuua

SEQ ID NO: 1287 - RNA, 19 nt, artificial
  RNA for silencing
guugagugccucgacuuag

SEQ ID NO: 1288 - RNA, 19 nt, artificial
  RNA for silencing
uugagugccucgacuuaga

SEQ ID NO: 1289 - RNA, 19 nt, artificial
  RNA for silencing
ugagugccucgacuuagau

SEQ ID NO: 1290 - RNA, 19 nt, artificial
  RNA for silencing
gagugccucgacuuagauu

SEQ ID NO: 1291 - RNA, 19 nt, artificial
  RNA for silencing
agugccucgacuuagauug

SEQ ID NO: 1292 - RNA, 19 nt, artificial
  RNA for silencing
gugccucgacuuagauugc

SEQ ID NO: 1293 - RNA, 19 nt, artificial
  RNA for silencing
ugccucgacuuagauugca

SEQ ID NO: 1294 - RNA, 19 nt, artificial
  RNA for silencing
gccucgacuuagauugcaa

SEQ ID NO: 1295 - RNA, 19 nt, artificial
  RNA for silencing
ccucgacuuagauugcaau

SEQ ID NO: 1296 - RNA, 19 nt, artificial
  RNA for silencing
cucgacuuagauugcaaua

SEQ ID NO: 1297 - RNA, 19 nt, artificial
  RNA for silencing
ucgacuuagauugcaauau

SEQ ID NO: 1298 - RNA, 19 nt, artificial
  RNA for silencing
cgacuuagauugcaauaua

SEQ ID NO: 1299 - RNA, 19 nt, artificial
  RNA for silencing
gacuuagauugcaauauaa

SEQ ID NO: 1300 - RNA, 19 nt, artificial
  RNA for silencing
acuuagauugcaauauaag

SEQ ID NO: 1301 - RNA, 19 nt, artificial
  RNA for silencing
cuuagauugcaauauaagc

SEQ ID NO: 1302 - RNA, 19 nt, artificial
  RNA for silencing
uuagauugcaauauaagcg

SEQ ID NO: 1303 - RNA, 19 nt, artificial
  RNA for silencing
uagauugcaauauaagcgg

SEQ ID NO: 1304 - RNA, 19 nt, artificial
  RNA for silencing
agauugcaauauaagcggc

SEQ ID NO: 1305 - RNA, 19 nt, artificial
  RNA for silencing
gauugcaauauaagcggcc

SEQ ID NO: 1306 - RNA, 19 nt, artificial
  RNA for silencing
auugcaauauaagcggcca

SEQ ID NO: 1307 - RNA, 19 nt, artificial
  RNA for silencing
uugcaauauaagcggccag

SEQ ID NO: 1308 - RNA, 19 nt, artificial
  RNA for silencing
ugcaauauaagcggccagc

SEQ ID NO: 1309 - RNA, 19 nt, artificial
  RNA for silencing
gcaauauaagcggccagca

SEQ ID NO: 1310 - RNA, 19 nt, artificial
  RNA for silencing
caauauaagcggccagcaa

SEQ ID NO: 1311 - RNA, 19 nt, artificial
  RNA for silencing
aauauaagcggccagcaaa

SEQ ID NO: 1312 - RNA, 19 nt, artificial
  RNA for silencing
auauaagcggccagcaaac

SEQ ID NO: 1313 - RNA, 19 nt, artificial
  RNA for silencing
uauaagcggccagcaaaca

SEQ ID NO: 1314 - RNA, 19 nt, artificial
  RNA for silencing
auaagcggccagcaaacaa

SEQ ID NO: 1315 - RNA, 19 nt, artificial
  RNA for silencing
uaagcggccagcaaacaag

SEQ ID NO: 1316 - RNA, 19 nt, artificial
  RNA for silencing
aagcggccagcaaacaagu

SEQ ID NO: 1317 - RNA, 19 nt, artificial
  RNA for silencing
agcggccagcaaacaaguc

SEQ ID NO: 1318 - RNA, 19 nt, artificial
  RNA for silencing
gcggccagcaaacaagucu

SEQ ID NO: 1319 - RNA, 19 nt, artificial
  RNA for silencing
cggccagcaaacaagucuc

SEQ ID NO: 1320 - RNA, 19 nt, artificial
  RNA for silencing
ggccagcaaacaagucuca

SEQ ID NO: 1321 - RNA, 19 nt, artificial
  RNA for silencing
gccagcaaacaagucucaa

SEQ ID NO: 1322 - RNA, 19 nt, artificial
  RNA for silencing
ccagcaaacaagucucaaa

SEQ ID NO: 1323 - RNA, 19 nt, artificial
  RNA for silencing
cagcaaacaagucucaaaa

SEQ ID NO: 1324 - RNA, 19 nt, artificial
  RNA for silencing
agcaaacaagucucaaaaa

SEQ ID NO: 1325 - RNA, 19 nt, artificial
  RNA for silencing
gcaaacaagucucaaaaaa

SEQ ID NO: 1326 - RNA, 19 nt, artificial
  RNA for silencing
caaacaagucucaaaaaaa

SEQ ID NO: 1327 - RNA, 19 nt, artificial
  RNA for silencing
aaacaagucucaaaaaaaa

SEQ ID NO: 1328 - RNA, 19 nt, artificial
  RNA for silencing
aacaagucucaaaaaaaag

SEQ ID NO: 1329 - RNA, 19 nt, artificial
  RNA for silencing
acaagucucaaaaaaaagu

SEQ ID NO: 1330 - RNA, 19 nt, artificial
  RNA for silencing
caagucucaaaaaaaaguu

SEQ ID NO: 1331 - RNA, 19 nt, artificial
  RNA for silencing
aagucucaaaaaaaaguua

SEQ ID NO: 1332 - RNA, 19 nt, artificial
  RNA for silencing
agucucaaaaaaaaguuac

SEQ ID NO: 1333 - RNA, 19 nt, artificial
  RNA for silencing
gucucaaaaaaaaguuacg

SEQ ID NO: 1334 - RNA, 19 nt, artificial
  RNA for silencing
ucucaaaaaaaaguuacgu

SEQ ID NO: 1335 - RNA, 19 nt, artificial
  RNA for silencing
cucaaaaaaaaguuacgug

SEQ ID NO: 1336 - RNA, 19 nt, artificial
  RNA for silencing
ucaaaaaaaaguuacgugc

SEQ ID NO: 1337 - RNA, 19 nt, artificial
  RNA for silencing
caaaaaaaaguuacgugcg

SEQ ID NO: 1338 - RNA, 19 nt, artificial
  RNA for silencing
aaaaaaaaguuacgugcgu

SEQ ID NO: 1339 - RNA, 19 nt, artificial
  RNA for silencing
aaaaaaaguuacgugcguu

SEQ ID NO: 1340 - RNA, 19 nt, artificial
  RNA for silencing
aaaaaaguuacgugcguuu

SEQ ID NO: 1341 - RNA, 19 nt, artificial
  RNA for silencing
aaaaaguuacgugcguuuc

SEQ ID NO: 1342 - RNA, 19 nt, artificial
  RNA for silencing
aaaaguuacgugcguuucu

SEQ ID NO: 1343 - RNA, 19 nt, artificial
  RNA for silencing
aaaguuacgugcguuucug

SEQ ID NO: 1344 - RNA, 19 nt, artificial
  RNA for silencing
aaguuacgugcguuucugc

SEQ ID NO: 1345 - RNA, 19 nt, artificial
  RNA for silencing
aguuacgugcguuucugcg

SEQ ID NO: 1346 - RNA, 19 nt, artificial
  RNA for silencing
guuacgugcguuucugcga

SEQ ID NO: 1347 - RNA, 19 nt, artificial
  RNA for silencing
uuacgugcguuucugcgag

SEQ ID NO: 1348 - RNA, 19 nt, artificial
  RNA for silencing
uacgugcguuucugcgagu

SEQ ID NO: 1349 - RNA, 19 nt, artificial
  RNA for silencing
acgugcguuucugcgagug

SEQ ID NO: 1350 - RNA, 19 nt, artificial
  RNA for silencing
cgugcguuucugcgagugu

SEQ ID NO: 1351 - RNA, 19 nt, artificial
  RNA for silencing
gugcguuucugcgaguguu

SEQ ID NO: 1352 - RNA, 19 nt, artificial
  RNA for silencing
ugcguuucugcgaguguua

SEQ ID NO: 1353 - RNA, 19 nt, artificial
  RNA for silencing
gcguuucugcgaguguuau

SEQ ID NO: 1354 - RNA, 19 nt, artificial
  RNA for silencing
cguuucugcgaguguuauu

SEQ ID NO: 1355 - RNA, 19 nt, artificial
  RNA for silencing
guuucugcgaguguuauuu

SEQ ID NO: 1356 - RNA, 19 nt, artificial
  RNA for silencing
uuucugcgaguguuauuuu

SEQ ID NO: 1357 - RNA, 19 nt, artificial
  RNA for silencing
uucugcgaguguuauuuug

SEQ ID NO: 1358 - RNA, 19 nt, artificial
  RNA for silencing
ucugcgaguguuauuuugu

SEQ ID NO: 1359 - RNA, 19 nt, artificial
  RNA for silencing
cugcgaguguuauuuuguu

SEQ ID NO: 1360 - RNA, 19 nt, artificial
  RNA for silencing
ugcgaguguuauuuuguua

SEQ ID NO: 1361 - RNA, 19 nt, artificial
  RNA for silencing
gcgaguguuauuuuguuaa

SEQ ID NO: 1362 - RNA, 19 nt, artificial
  RNA for silencing
cgaguguuauuuuguuaag

SEQ ID NO: 1363 - RNA, 19 nt, artificial
  RNA for silencing
gaguguuauuuuguuaaga

SEQ ID NO: 1364 - RNA, 19 nt, artificial
  RNA for silencing
aguguuauuuuguuaagaa

SEQ ID NO: 1365 - RNA, 19 nt, artificial
  RNA for silencing
guguuauuuuguuaagaac

SEQ ID NO: 1366 - RNA, 19 nt, artificial
  RNA for silencing
uguuauuuuguuaagaacg

SEQ ID NO: 1367 - RNA, 19 nt, artificial
  RNA for silencing
guuauuuuguuaagaacgg

SEQ ID NO: 1368 - RNA, 19 nt, artificial
  RNA for silencing
uuauuuuguuaagaacggc

SEQ ID NO: 1369 - RNA, 19 nt, artificial
  RNA for silencing
uauuuuguuaagaacggcu

SEQ ID NO: 1370 - RNA, 19 nt, artificial
  RNA for silencing
auuuuguuaagaacggcuc

SEQ ID NO: 1371 - RNA, 19 nt, artificial
  RNA for silencing
uuuuguuaagaacggcuca

SEQ ID NO: 1372 - RNA, 19 nt, artificial
  RNA for silencing
uuuguuaagaacggcucac

SEQ ID NO: 1373 - RNA, 19 nt, artificial
  RNA for silencing
uuguuaagaacggcucaca

SEQ ID NO: 1374 - RNA, 19 nt, artificial
  RNA for silencing
uguuaagaacggcucacag

SEQ ID NO: 1375 - RNA, 19 nt, artificial
  RNA for silencing
guuaagaacggcucacagu

SEQ ID NO: 1376 - RNA, 19 nt, artificial
  RNA for silencing
uuaagaacggcucacagug

SEQ ID NO: 1377 - RNA, 19 nt, artificial
  RNA for silencing
uaagaacggcucacagugu

SEQ ID NO: 1378 - RNA, 19 nt, artificial
  RNA for silencing
aagaacggcucacaguguc

SEQ ID NO: 1379 - RNA, 19 nt, artificial
  RNA for silencing
agaacggcucacagugucc

SEQ ID NO: 1380 - RNA, 19 nt, artificial
  RNA for silencing
gaacggcucacaguguccu

SEQ ID NO: 1381 - RNA, 19 nt, artificial
  RNA for silencing
aacggcucacaguguccuc

SEQ ID NO: 1382 - RNA, 19 nt, artificial
  RNA for silencing
acggcucacaguguccucu

SEQ ID NO: 1383 - RNA, 19 nt, artificial
  RNA for silencing
cggcucacaguguccucuu

SEQ ID NO: 1384 - RNA, 19 nt, artificial
  RNA for silencing
ggcucacaguguccucuuc

SEQ ID NO: 1385 - RNA, 19 nt, artificial
  RNA for silencing
gcucacaguguccucuucc

SEQ ID NO: 1386 - RNA, 19 nt, artificial
  RNA for silencing
cucacaguguccucuuccu

SEQ ID NO: 1387 - RNA, 19 nt, artificial
  RNA for silencing
ucacaguguccucuuccug

SEQ ID NO: 1388 - RNA, 19 nt, artificial
  RNA for silencing
cacaguguccucuuccugu

SEQ ID NO: 1389 - RNA, 19 nt, artificial
  RNA for silencing
acaguguccucuuccugug

SEQ ID NO: 1390 - RNA, 19 nt, artificial
  RNA for silencing
caguguccucuuccugugu

SEQ ID NO: 1391 - RNA, 19 nt, artificial
  RNA for silencing
aguguccucuuccuguguu

SEQ ID NO: 1392 - RNA, 19 nt, artificial
  RNA for silencing
guguccucuuccuguguua

SEQ ID NO: 1393 - RNA, 19 nt, artificial
  RNA for silencing
uguccucuuccuguguuac

SEQ ID NO: 1394 - RNA, 19 nt, artificial
  RNA for silencing
guccucuuccuguguuaca

SEQ ID NO: 1395 - RNA, 19 nt, artificial
  RNA for silencing
uccucuuccuguguuacag

SEQ ID NO: 1396 - RNA, 19 nt, artificial
  RNA for silencing
ccucuuccuguguuacaga

SEQ ID NO: 1397 - RNA, 19 nt, artificial
  RNA for silencing
cucuuccuguguuacagaa

SEQ ID NO: 1398 - RNA, 19 nt, artificial
  RNA for silencing
ucuuccuguguuacagaag

SEQ ID NO: 1399 - RNA, 19 nt, artificial
  RNA for silencing
cuuccuguguuacagaagc

SEQ ID NO: 1400 - RNA, 19 nt, artificial
  RNA for silencing
uuccuguguuacagaagcc

SEQ ID NO: 1401 - RNA, 19 nt, artificial
  RNA for silencing
uccuguguuacagaagcca

SEQ ID NO: 1402 - RNA, 19 nt, artificial
  RNA for silencing
ccuguguuacagaagccaa

SEQ ID NO: 1403 - RNA, 19 nt, artificial
  RNA for silencing
cuguguuacagaagccaac

SEQ ID NO: 1404 - RNA, 19 nt, artificial
  RNA for silencing
uguguuacagaagccaacc

SEQ ID NO: 1405 - RNA, 19 nt, artificial
  RNA for silencing
guguuacagaagccaaccu

SEQ ID NO: 1406 - RNA, 19 nt, artificial
  RNA for silencing
uguuacagaagccaaccug

SEQ ID NO: 1407 - RNA, 19 nt, artificial
  RNA for silencing
guuacagaagccaaccuga

SEQ ID NO: 1408 - RNA, 19 nt, artificial
  RNA for silencing
uuacagaagccaaccugaa

SEQ ID NO: 1409 - RNA, 19 nt, artificial
  RNA for silencing
uacagaagccaaccugaaa

SEQ ID NO: 1410 - RNA, 19 nt, artificial
  RNA for silencing
acagaagccaaccugaaau

SEQ ID NO: 1411 - RNA, 19 nt, artificial
  RNA for silencing
cagaagccaaccugaaaug

SEQ ID NO: 1412 - RNA, 19 nt, artificial
  RNA for silencing
agaagccaaccugaaauga

SEQ ID NO: 1413 - RNA, 19 nt, artificial
  RNA for silencing
gaagccaaccugaaaugaa

SEQ ID NO: 1414 - RNA, 19 nt, artificial
  RNA for silencing
aagccaaccugaaaugaaa

SEQ ID NO: 1415 - RNA, 19 nt, artificial
  RNA for silencing
agccaaccugaaaugaaac

SEQ ID NO: 1416 - RNA, 19 nt, artificial
  RNA for silencing
gccaaccugaaaugaaacu

SEQ ID NO: 1417 - RNA, 19 nt, artificial
  RNA for silencing
ccaaccugaaaugaaacua

SEQ ID NO: 1418 - RNA, 19 nt, artificial
  RNA for silencing
caaccugaaaugaaacuag

SEQ ID NO: 1419 - RNA, 19 nt, artificial
  RNA for silencing
aaccugaaaugaaacuagu

SEQ ID NO: 1420 - RNA, 19 nt, artificial
  RNA for silencing
accugaaaugaaacuaguc

SEQ ID NO: 1421 - RNA, 19 nt, artificial
  RNA for silencing
ccugaaaugaaacuagucu

SEQ ID NO: 1422 - RNA, 19 nt, artificial
  RNA for silencing
cugaaaugaaacuagucug

SEQ ID NO: 1423 - RNA, 19 nt, artificial
  RNA for silencing
ugaaaugaaacuagucugg

SEQ ID NO: 1424 - RNA, 19 nt, artificial
  RNA for silencing
gaaaugaaacuagucugga

SEQ ID NO: 1425 - RNA, 19 nt, artificial
  RNA for silencing
aaaugaaacuagucuggaa

SEQ ID NO: 1426 - RNA, 19 nt, artificial
  RNA for silencing
aaugaaacuagucuggaaa

SEQ ID NO: 1427 - RNA, 19 nt, artificial
  RNA for silencing
augaaacuagucuggaaaa

SEQ ID NO: 1428 - RNA, 19 nt, artificial
  RNA for silencing
ugaaacuagucuggaaaaa

SEQ ID NO: 1429 - RNA, 19 nt, artificial
  RNA for silencing
gaaacuagucuggaaaaau

SEQ ID NO: 1430 - RNA, 19 nt, artificial
  RNA for silencing
aaacuagucuggaaaaauu

SEQ ID NO: 1431 - RNA, 19 nt, artificial
  RNA for silencing
aacuagucuggaaaaauuc

SEQ ID NO: 1432 - RNA, 19 nt, artificial
  RNA for silencing
acuagucuggaaaaauuca

SEQ ID NO: 1433 - RNA, 19 nt, artificial
  RNA for silencing
cuagucuggaaaaauucau

SEQ ID NO: 1434 - RNA, 19 nt, artificial
  RNA for silencing
uagucuggaaaaauucauu

SEQ ID NO: 1435 - RNA, 19 nt, artificial
  RNA for silencing
agucuggaaaaauucauug

SEQ ID NO: 1436 - RNA, 19 nt, artificial
  RNA for silencing
gucuggaaaaauucauugu

SEQ ID NO: 1437 - RNA, 19 nt, artificial
  RNA for silencing
ucuggaaaaauucauuguu

SEQ ID NO: 1438 - RNA, 19 nt, artificial
  RNA for silencing
cuggaaaaauucauuguuc

SEQ ID NO: 1439 - RNA, 19 nt, artificial
  RNA for silencing
uggaaaaauucauuguucu

SEQ ID NO: 1440 - RNA, 19 nt, artificial
  RNA for silencing
ggaaaaauucauuguucuc

SEQ ID NO: 1441 - RNA, 19 nt, artificial
  RNA for silencing
gaaaaauucauuguucucu

SEQ ID NO: 1442 - RNA, 19 nt, artificial
  RNA for silencing
aaaaauucauuguucucug

SEQ ID NO: 1443 - RNA, 19 nt, artificial
  RNA for silencing
aaaauucauuguucucugu

SEQ ID NO: 1444 - RNA, 19 nt, artificial
  RNA for silencing
aaauucauuguucucugua

SEQ ID NO: 1445 - RNA, 19 nt, artificial
  RNA for silencing
aauucauuguucucuguag

SEQ ID NO: 1446 - RNA, 19 nt, artificial
  RNA for silencing
auucauuguucucuguagu

SEQ ID NO: 1447 - RNA, 19 nt, artificial
  RNA for silencing
uucauuguucucuguaguu

SEQ ID NO: 1448 - RNA, 19 nt, artificial
  RNA for silencing
ucauuguucucuguaguug

SEQ ID NO: 1449 - RNA, 19 nt, artificial
  RNA for silencing
cauuguucucuguaguugc

SEQ ID NO: 1450 - RNA, 19 nt, artificial
  RNA for silencing
auuguucucuguaguugca

SEQ ID NO: 1451 - RNA, 19 nt, artificial
  RNA for silencing
uuguucucuguaguugcag

SEQ ID NO: 1452 - RNA, 19 nt, artificial
  RNA for silencing
uguucucuguaguugcagc

SEQ ID NO: 1453 - RNA, 19 nt, artificial
  RNA for silencing
guucucuguaguugcagcu

SEQ ID NO: 1454 - RNA, 19 nt, artificial
  RNA for silencing
uucucuguaguugcagcug

SEQ ID NO: 1455 - RNA, 19 nt, artificial
  RNA for silencing
ucucuguaguugcagcugu

SEQ ID NO: 1456 - RNA, 19 nt, artificial
  RNA for silencing
cucuguaguugcagcugua

SEQ ID NO: 1457 - RNA, 19 nt, artificial
  RNA for silencing
ucuguaguugcagcuguac

SEQ ID NO: 1458 - RNA, 19 nt, artificial
  RNA for silencing
cuguaguugcagcuguacc

SEQ ID NO: 1459 - RNA, 19 nt, artificial
  RNA for silencing
uguaguugcagcuguaccu

SEQ ID NO: 1460 - RNA, 19 nt, artificial
  RNA for silencing
guaguugcagcuguaccug

SEQ ID NO: 1461 - RNA, 19 nt, artificial
  RNA for silencing
uaguugcagcuguaccuga

SEQ ID NO: 1462 - RNA, 19 nt, artificial
  RNA for silencing
aguugcagcuguaccugaa

SEQ ID NO: 1463 - RNA, 19 nt, artificial
  RNA for silencing
guugcagcuguaccugaaa

SEQ ID NO: 1464 - RNA, 19 nt, artificial
  RNA for silencing
uugcagcuguaccugaaau

SEQ ID NO: 1465 - RNA, 19 nt, artificial
  RNA for silencing
ugcagcuguaccugaaaua

SEQ ID NO: 1466 - RNA, 19 nt, artificial
  RNA for silencing
gcagcuguaccugaaauaa

SEQ ID NO: 1467 - RNA, 19 nt, artificial
  RNA for silencing
cagcuguaccugaaauaaa

SEQ ID NO: 1468 - RNA, 19 nt, artificial
  RNA for silencing
agcuguaccugaaauaaaa

SEQ ID NO: 1469 - RNA, 19 nt, artificial
  RNA for silencing
gcuguaccugaaauaaaaa

SEQ ID NO: 1470 - RNA, 19 nt, artificial
  RNA for silencing
cuguaccugaaauaaaaau

SEQ ID NO: 1471 - RNA, 19 nt, artificial
  RNA for silencing
uguaccugaaauaaaaaug

SEQ ID NO: 1472 - RNA, 19 nt, artificial
  RNA for silencing
guaccugaaauaaaaaugu

SEQ ID NO: 1473 - RNA, 19 nt, artificial
  RNA for silencing
uaccugaaauaaaaauguu

SEQ ID NO: 1474 - RNA, 19 nt, artificial
  RNA for silencing
accugaaauaaaaauguua

SEQ ID NO: 1475 - RNA, 19 nt, artificial
  RNA for silencing
ccugaaauaaaaauguuau

SEQ ID NO: 1476 - RNA, 19 nt, artificial
  RNA for silencing
cugaaauaaaaauguuauu

SEQ ID NO: 1477 - RNA, 19 nt, artificial
  RNA for silencing
ugaaauaaaaauguuauug

SEQ ID NO: 1478 - RNA, 19 nt, artificial
  RNA for silencing
gaaauaaaaauguuauuga

SEQ ID NO: 1479 - RNA, 19 nt, artificial
  RNA for silencing
aaauaaaaauguuauugau

SEQ ID NO: 1480 - RNA, 19 nt, artificial
  RNA for silencing
aauaaaaauguuauugaug

SEQ ID NO: 1481 - RNA, 19 nt, artificial
  RNA for silencing
auaaaaauguuauugauga

SEQ ID NO: 1482 - RNA, 19 nt, artificial
  RNA for silencing
uaaaaauguuauugaugac

SEQ ID NO: 1483 - RNA, 19 nt, artificial
  RNA for silencing
aaaaauguuauugaugacu

SEQ ID NO: 1484 - RNA, 19 nt, artificial
  RNA for silencing
aaaauguuauugaugacug

SEQ ID NO: 1485 - RNA, 19 nt, artificial
  RNA for silencing
aaauguuauugaugacuga

SEQ ID NO: 1486 - RNA, 19 nt, artificial
  RNA for silencing
aauguuauugaugacugaa

SEQ ID NO: 1487 - RNA, 19 nt, artificial
  RNA for silencing
auguuauugaugacugaaa

SEQ ID NO: 1488 - RNA, 19 nt, artificial
  RNA for silencing
uguuauugaugacugaaaa

SEQ ID NO: 1489 - RNA, 19 nt, artificial
  RNA for silencing
guuauugaugacugaaaaa

SEQ ID NO: 1490 - RNA, 19 nt, artificial
  RNA for silencing
uuauugaugacugaaaaaa

SEQ ID NO: 1491 - RNA, 19 nt, artificial
  RNA for silencing
uauugaugacugaaaaaaa

SEQ ID NO: 1492 - RNA, 19 nt, artificial
  RNA for silencing
auugaugacugaaaaaaaa

SEQ ID NO: 1493 - RNA, 18 nt, artificial
  RNA for silencing
uugaugacugaaaaaaaa

SEQ ID NO: 1494 - RNA, 18 nt, artificial
  RNA for silencing
ugaugacugaaaaaaaaa

SEQ ID NO: 1495 - RNA, 18 nt, artificial
  RNA for silencing
gaugacugaaaaaaaaaa

SEQ ID NO: 1496 - RNA, 18 nt, artificial
  RNA for silencing
augacugaaaaaaaaaaa

SEQ ID NO: 1497 - RNA, 18 nt, artificial
  RNA for silencing
ugacugaaaaaaaaaaaa

SEQ ID NO: 1498 - RNA, 18 nt, artificial
  RNA for silencing
gacugaaaaaaaaaaaaa

SEQ ID NO: 1499 - RNA, 18 nt, artificial
  RNA for silencing
acugaaaaaaaaaaaaaa

SEQ ID NO: 1500 - RNA, 18 nt, artificial
  RNA for silencing
cugaaaaaaaaaaaaaaa

SEQ ID NO: 1501 - RNA, 18 nt, artificial
  RNA for silencing
ugaaaaaaaaaaaaaaaa

SEQ ID NO: 1502 - RNA, 19 nt, artificial
  RNA for silencing
aaaacaguggcagaugaaa

SEQ ID NO: 1503 - RNA, 19 nt, artificial
  RNA for silencing
aaacaguggcagaugaaag

SEQ ID NO: 1504 - RNA, 19 nt, artificial
  RNA for silencing
aacaguggcagaugaaagg

SEQ ID NO: 1505 - RNA, 19 nt, artificial
  RNA for silencing
acaguggcagaugaaaggg

SEQ ID NO: 1506 - RNA, 19 nt, artificial
  RNA for silencing
caguggcagaugaaaggga

SEQ ID NO: 1507 - RNA, 19 nt, artificial
  RNA for silencing
aguggcagaugaaagggau

SEQ ID NO: 1508 - RNA, 19 nt, artificial
  RNA for silencing
guggcagaugaaagggaug

SEQ ID NO: 1509 - RNA, 19 nt, artificial
  RNA for silencing
uggcagaugaaagggaugg

SEQ ID NO: 1510 - RNA, 19 nt, artificial
  RNA for silencing
ggcagaugaaagggaugga

SEQ ID NO: 1511 - RNA, 19 nt, artificial
  RNA for silencing
gcagaugaaagggauggag

SEQ ID NO: 1512 - RNA, 19 nt, artificial
  RNA for silencing
cagaugaaagggauggaga

SEQ ID NO: 1513 - RNA, 19 nt, artificial
  RNA for silencing
agaugaaagggauggagaa

SEQ ID NO: 1514 - RNA, 19 nt, artificial
  RNA for silencing
gaugaaagggauggagaac

SEQ ID NO: 1515 - RNA, 19 nt, artificial
  RNA for silencing
augaaagggauggagaacc

SEQ ID NO: 1516 - RNA, 19 nt, artificial
  RNA for silencing
ugaaagggauggagaaccg

SEQ ID NO: 1517 - RNA, 19 nt, artificial
  RNA for silencing
gaaagggauggagaaccgc

SEQ ID NO: 1518 - RNA, 19 nt, artificial
  RNA for silencing
aaagggauggagaaccgcc

SEQ ID NO: 1519 - RNA, 19 nt, artificial
  RNA for silencing
aagggauggagaaccgcca

SEQ ID NO: 1520 - RNA, 19 nt, artificial
  RNA for silencing
agggauggagaaccgccau

SEQ ID NO: 1521 - RNA, 19 nt, artificial
  RNA for silencing
gggauggagaaccgccaug

SEQ ID NO: 1522 - RNA, 19 nt, artificial
  RNA for silencing
ggauggagaaccgccaugc

SEQ ID NO: 1523 - RNA, 19 nt, artificial
  RNA for silencing
gauggagaaccgccaugcc

SEQ ID NO: 1524 - RNA, 19 nt, artificial
  RNA for silencing
augcccggugacuccccgg

SEQ ID NO: 1525 - RNA, 19 nt, artificial
  RNA for silencing
ugcccggugacuccccggc

SEQ ID NO: 1526 - RNA, 19 nt, artificial
  RNA for silencing
gcccggugacuccccggcc

SEQ ID NO: 1527 - RNA, 19 nt, artificial
  RNA for silencing
cccggugacuccccggccg

SEQ ID NO: 1528 - RNA, 19 nt, artificial
  RNA for silencing
ccggugacuccccggccgu

SEQ ID NO: 1529 - RNA, 19 nt, artificial
  RNA for silencing
cggugacuccccggccguc

SEQ ID NO: 1530 - RNA, 19 nt, artificial
  RNA for silencing
ggugacuccccggccguca

SEQ ID NO: 1531 - RNA, 19 nt, artificial
  RNA for silencing
gugacuccccggccgucag

SEQ ID NO: 1532 - RNA, 19 nt, artificial
  RNA for silencing
ugacuccccggccgucagc

SEQ ID NO: 1533 - RNA, 19 nt, artificial
  RNA for silencing
gacuccccggccgucagca

SEQ ID NO: 1534 - RNA, 19 nt, artificial
  RNA for silencing
acuccccggccgucagcaa

SEQ ID NO: 1535 - RNA, 19 nt, artificial
  RNA for silencing
cuccccggccgucagcaag

SEQ ID NO: 1536 - RNA, 19 nt, artificial
  RNA for silencing
uccccggccgucagcaagc

SEQ ID NO: 1537 - RNA, 19 nt, artificial
  RNA for silencing
ccccggccgucagcaagcc

SEQ ID NO: 1538 - RNA, 19 nt, artificial
  RNA for silencing
cccggccgucagcaagccc

SEQ ID NO: 1539 - RNA, 19 nt, artificial
  RNA for silencing
ccggccgucagcaagcccc

SEQ ID NO: 1540 - RNA, 19 nt, artificial
  RNA for silencing
cggccgucagcaagccccc

SEQ ID NO: 1541 - RNA, 19 nt, artificial
  RNA for silencing
ggccgucagcaagcccccg

SEQ ID NO: 1542 - RNA, 19 nt, artificial
  RNA for silencing
gccgucagcaagcccccgg

SEQ ID NO: 1543 - RNA, 19 nt, artificial
  RNA for silencing
ccgucagcaagcccccgga

SEQ ID NO: 1544 - RNA, 19 nt, artificial
  RNA for silencing
cgucagcaagcccccggac

SEQ ID NO: 1545 - RNA, 19 nt, artificial
  RNA for silencing
gucagcaagcccccggacg

SEQ ID NO: 1546 - RNA, 19 nt, artificial
  RNA for silencing
ucagcaagcccccggacgg

SEQ ID NO: 1547 - RNA, 19 nt, artificial
  RNA for silencing
cagcaagcccccggacggc

SEQ ID NO: 1548 - RNA, 19 nt, artificial
  RNA for silencing
agcaagcccccggacggcg

SEQ ID NO: 1549 - RNA, 19 nt, artificial
  RNA for silencing
gcaagcccccggacggcgc

SEQ ID NO: 1550 - RNA, 19 nt, artificial
  RNA for silencing
caagcccccggacggcgcc

SEQ ID NO: 1551 - RNA, 19 nt, artificial
  RNA for silencing
aagcccccggacggcgccg

SEQ ID NO: 1552 - RNA, 19 nt, artificial
  RNA for silencing
agcccccggacggcgccgg

SEQ ID NO: 1553 - RNA, 19 nt, artificial
  RNA for silencing
gcccccggacggcgccggg

SEQ ID NO: 1554 - RNA, 19 nt, artificial
  RNA for silencing
cccccggacggcgccgggc

SEQ ID NO: 1555 - RNA, 19 nt, artificial
  RNA for silencing
ccccggacggcgccgggcc

SEQ ID NO: 1556 - RNA, 19 nt, artificial
  RNA for silencing
cccggacggcgccgggccg

SEQ ID NO: 1557 - RNA, 19 nt, artificial
  RNA for silencing
ccggacggcgccgggccgg

SEQ ID NO: 1558 - RNA, 19 nt, artificial
  RNA for silencing
cggacggcgccgggccggg

SEQ ID NO: 1559 - RNA, 19 nt, artificial
  RNA for silencing
ggacggcgccgggccgggg

SEQ ID NO: 1560 - RNA, 19 nt, artificial
  RNA for silencing
gacggcgccgggccggggg

SEQ ID NO: 1561 - RNA, 19 nt, artificial
  RNA for silencing
acggcgccgggccggggga

SEQ ID NO: 1562 - RNA, 19 nt, artificial
  RNA for silencing
cggcgccgggccgggggac

SEQ ID NO: 1563 - RNA, 19 nt, artificial
  RNA for silencing
ggcgccgggccgggggaca

SEQ ID NO: 1564 - RNA, 19 nt, artificial
  RNA for silencing
gcgccgggccgggggacaa

SEQ ID NO: 1565 - RNA, 19 nt, artificial
  RNA for silencing
cgccgggccgggggacaag

SEQ ID NO: 1566 - RNA, 19 nt, artificial
  RNA for silencing
gccgggccgggggacaagg

SEQ ID NO: 1567 - RNA, 19 nt, artificial
  RNA for silencing
ccgggccgggggacaaggc

SEQ ID NO: 1568 - RNA, 19 nt, artificial
  RNA for silencing
cgggccgggggacaaggcg

SEQ ID NO: 1569 - RNA, 19 nt, artificial
  RNA for silencing
gggccgggggacaaggcgg

SEQ ID NO: 1570 - RNA, 19 nt, artificial
  RNA for silencing
ggccgggggacaaggcggg

SEQ ID NO: 1571 - RNA, 19 nt, artificial
  RNA for silencing
gccgggggacaaggcgggc

SEQ ID NO: 1572 - RNA, 19 nt, artificial
  RNA for silencing
ccgggggacaaggcgggcg

SEQ ID NO: 1573 - RNA, 19 nt, artificial
  RNA for silencing
cgggggacaaggcgggcgg

SEQ ID NO: 1574 - RNA, 19 nt, artificial
  RNA for silencing
gggggacaaggcgggcggc

SEQ ID NO: 1575 - RNA, 19 nt, artificial
  RNA for silencing
ggggacaaggcgggcggcc

SEQ ID NO: 1576 - RNA, 19 nt, artificial
  RNA for silencing
gggacaaggcgggcggccu

SEQ ID NO: 1577 - RNA, 19 nt, artificial
  RNA for silencing
ggacaaggcgggcggccuc

SEQ ID NO: 1578 - RNA, 19 nt, artificial
  RNA for silencing
gacaaggcgggcggccucg

SEQ ID NO: 1579 - RNA, 19 nt, artificial
  RNA for silencing
acaaggcgggcggccucgg

SEQ ID NO: 1580 - RNA, 19 nt, artificial
  RNA for silencing
caaggcgggcggccucggc

SEQ ID NO: 1581 - RNA, 19 nt, artificial
  RNA for silencing
aaggcgggcggccucggca

SEQ ID NO: 1582 - RNA, 19 nt, artificial
  RNA for silencing
aggcgggcggccucggcaa

SEQ ID NO: 1583 - RNA, 19 nt, artificial
  RNA for silencing
ggcgggcggccucggcaag

SEQ ID NO: 1584 - RNA, 19 nt, artificial
  RNA for silencing
gcgggcggccucggcaagg

SEQ ID NO: 1585 - RNA, 19 nt, artificial
  RNA for silencing
cgggcggccucggcaaggc

SEQ ID NO: 1586 - RNA, 19 nt, artificial
  RNA for silencing
gggcggccucggcaaggcg

SEQ ID NO: 1587 - RNA, 19 nt, artificial
  RNA for silencing
ggcggccucggcaaggcgg

SEQ ID NO: 1588 - RNA, 19 nt, artificial
  RNA for silencing
gcggccucggcaaggcggc

SEQ ID NO: 1589 - RNA, 19 nt, artificial
  RNA for silencing
cggccucggcaaggcggcg

SEQ ID NO: 1590 - RNA, 19 nt, artificial
  RNA for silencing
ggccucggcaaggcggcgg

SEQ ID NO: 1591 - RNA, 19 nt, artificial
  RNA for silencing
gccucggcaaggcggcggc

SEQ ID NO: 1592 - RNA, 19 nt, artificial
  RNA for silencing
ccucggcaaggcggcggcc

SEQ ID NO: 1593 - RNA, 19 nt, artificial
  RNA for silencing
cucggcaaggcggcggccc

SEQ ID NO: 1594 - RNA, 19 nt, artificial
  RNA for silencing
ucggcaaggcggcggccca

SEQ ID NO: 1595 - RNA, 19 nt, artificial
  RNA for silencing
cggcaaggcggcggcccaa

SEQ ID NO: 1596 - RNA, 19 nt, artificial
  RNA for silencing
ggcaaggcggcggcccaaa

SEQ ID NO: 1597 - RNA, 19 nt, artificial
  RNA for silencing
gcaaggcggcggcccaaau

SEQ ID NO: 1598 - RNA, 19 nt, artificial
  RNA for silencing
caaggcggcggcccaaaug

SEQ ID NO: 1599 - RNA, 19 nt, artificial
  RNA for silencing
aaggcggcggcccaaaugg

SEQ ID NO: 1600 - RNA, 19 nt, artificial
  RNA for silencing
aggcggcggcccaaauggc

SEQ ID NO: 1601 - RNA, 19 nt, artificial
  RNA for silencing
ggcggcggcccaaauggcg

SEQ ID NO: 1602 - RNA, 19 nt, artificial
  RNA for silencing
gcggcggcccaaauggcgg

SEQ ID NO: 1603 - RNA, 19 nt, artificial
  RNA for silencing
cggcggcccaaauggcggc

SEQ ID NO: 1604 - RNA, 19 nt, artificial
  RNA for silencing
ggcggcccaaauggcggcc

SEQ ID NO: 1605 - RNA, 19 nt, artificial
  RNA for silencing
gcggcccaaauggcggccg

SEQ ID NO: 1606 - RNA, 19 nt, artificial
  RNA for silencing
cggcccaaauggcggccgc

SEQ ID NO: 1607 - RNA, 19 nt, artificial
  RNA for silencing
ggcccaaauggcggccgcc

SEQ ID NO: 1608 - RNA, 19 nt, artificial
  RNA for silencing
gcccaaauggcggccgccc

SEQ ID NO: 1609 - RNA, 19 nt, artificial
  RNA for silencing
cccaaauggcggccgcccc

SEQ ID NO: 1610 - RNA, 19 nt, artificial
  RNA for silencing
ccaaauggcggccgccccg

SEQ ID NO: 1611 - RNA, 19 nt, artificial
  RNA for silencing
caaauggcggccgccccgg

SEQ ID NO: 1612 - RNA, 19 nt, artificial
  RNA for silencing
aaauggcggccgccccggc

SEQ ID NO: 1613 - RNA, 19 nt, artificial
  RNA for silencing
aauggcggccgccccggcg

SEQ ID NO: 1614 - RNA, 19 nt, artificial
  RNA for silencing
auggcggccgccccggcgg

SEQ ID NO: 1615 - RNA, 19 nt, artificial
  RNA for silencing
uggcggccgccccggcggc

SEQ ID NO: 1616 - RNA, 19 nt, artificial
  RNA for silencing
ggcggccgccccggcggcg

SEQ ID NO: 1617 - RNA, 19 nt, artificial
  RNA for silencing
gcggccgccccggcggcgg

SEQ ID NO: 1618 - RNA, 19 nt, artificial
  RNA for silencing
cggccgccccggcggcggg

SEQ ID NO: 1619 - RNA, 19 nt, artificial
  RNA for silencing
ggccgccccggcggcgggc

SEQ ID NO: 1620 - RNA, 19 nt, artificial
  RNA for silencing
gccgccccggcggcgggca

SEQ ID NO: 1621 - RNA, 19 nt, artificial
  RNA for silencing
ccgccccggcggcgggcaa

SEQ ID NO: 1622 - RNA, 19 nt, artificial
  RNA for silencing
cgccccggcggcgggcaag

SEQ ID NO: 1623 - RNA, 19 nt, artificial
  RNA for silencing
gccccggcggcgggcaaga

SEQ ID NO: 1624 - RNA, 19 nt, artificial
  RNA for silencing
ccccggcggcgggcaagaa

SEQ ID NO: 1625 - RNA, 19 nt, artificial
  RNA for silencing
cccggcggcgggcaagaag

SEQ ID NO: 1626 - RNA, 19 nt, artificial
  RNA for silencing
ggcagcgggugauggccgc

SEQ ID NO: 1627 - RNA, 19 nt, artificial
  RNA for silencing
gcagcgggugauggccgcg

SEQ ID NO: 1628 - RNA, 19 nt, artificial
  RNA for silencing
cagcgggugauggccgcgc

SEQ ID NO: 1629 - RNA, 19 nt, artificial
  RNA for silencing
agcgggugauggccgcgca

SEQ ID NO: 1630 - RNA, 19 nt, artificial
  RNA for silencing
gcgggugauggccgcgcag

SEQ ID NO: 1631 - RNA, 19 nt, artificial
  RNA for silencing
cgggugauggccgcgcagg

SEQ ID NO: 1632 - RNA, 19 nt, artificial
  RNA for silencing
gggugauggccgcgcaggu

SEQ ID NO: 1633 - RNA, 19 nt, artificial
  RNA for silencing
ggugauggccgcgcagguu

SEQ ID NO: 1634 - RNA, 19 nt, artificial
  RNA for silencing
gugauggccgcgcagguug

SEQ ID NO: 1635 - RNA, 19 nt, artificial
  RNA for silencing
ugauggccgcgcagguugc

SEQ ID NO: 1636 - RNA, 19 nt, artificial
  RNA for silencing
gauggccgcgcagguugca

SEQ ID NO: 1637 - RNA, 19 nt, artificial
  RNA for silencing
auggccgcgcagguugcac

SEQ ID NO: 1638 - RNA, 19 nt, artificial
  RNA for silencing
uggccgcgcagguugcacu

SEQ ID NO: 1639 - RNA, 19 nt, artificial
  RNA for silencing
ggccgcgcagguugcacug

SEQ ID NO: 1640 - RNA, 19 nt, artificial
  RNA for silencing
gccgcgcagguugcacuga

SEQ ID NO: 1641 - RNA, 19 nt, artificial
  RNA for silencing
ccgcgcagguugcacugag

SEQ ID NO: 1642 - RNA, 19 nt, artificial
  RNA for silencing
cgcgcagguugcacugagg

SEQ ID NO: 1643 - RNA, 19 nt, artificial
  RNA for silencing
gcgcagguugcacugagga

SEQ ID NO: 1644 - RNA, 19 nt, artificial
  RNA for silencing
cgcagguugcacugaggag

SEQ ID NO: 1645 - RNA, 19 nt, artificial
  RNA for silencing
cgucugcgggugccuugcg

SEQ ID NO: 1646 - RNA, 19 nt, artificial
  RNA for silencing
gucugcgggugccuugcga

SEQ ID NO: 1647 - RNA, 19 nt, artificial
  RNA for silencing
ucugcgggugccuugcgau

SEQ ID NO: 1648 - RNA, 19 nt, artificial
  RNA for silencing
cugcgggugccuugcgaua

SEQ ID NO: 1649 - RNA, 19 nt, artificial
  RNA for silencing
ugcgggugccuugcgauac

SEQ ID NO: 1650 - RNA, 19 nt, artificial
  RNA for silencing
gcgggugccuugcgauacg

SEQ ID NO: 1651 - RNA, 19 nt, artificial
  RNA for silencing
cgggugccuugcgauacgu

SEQ ID NO: 1652 - RNA, 19 nt, artificial
  RNA for silencing
gggugccuugcgauacguc

SEQ ID NO: 1653 - RNA, 19 nt, artificial
  RNA for silencing
ggugccuugcgauacgucg

SEQ ID NO: 1654 - RNA, 19 nt, artificial
  RNA for silencing
gugccuugcgauacgucgg

SEQ ID NO: 1655 - RNA, 19 nt, artificial
  RNA for silencing
ugccuugcgauacgucggc

SEQ ID NO: 1656 - RNA, 19 nt, artificial
  RNA for silencing
gccuugcgauacgucggca

SEQ ID NO: 1657 - RNA, 19 nt, artificial
  RNA for silencing
ccuugcgauacgucggcau

SEQ ID NO: 1658 - RNA, 19 nt, artificial
  RNA for silencing
cuugcgauacgucggcaug

SEQ ID NO: 1659 - RNA, 19 nt, artificial
  RNA for silencing
uugcgauacgucggcaugg

SEQ ID NO: 1660 - RNA, 19 nt, artificial
  RNA for silencing
ugcgauacgucggcauggc

SEQ ID NO: 1661 - RNA, 19 nt, artificial
  RNA for silencing
gcgauacgucggcauggcu

SEQ ID NO: 1662 - RNA, 19 nt, artificial
  RNA for silencing
cgauacgucggcauggcug

SEQ ID NO: 1663 - RNA, 19 nt, artificial
  RNA for silencing
gauacgucggcauggcuga

SEQ ID NO: 1664 - RNA, 19 nt, artificial
  RNA for silencing
auacgucggcauggcugac

SEQ ID NO: 1665 - RNA, 19 nt, artificial
  RNA for silencing
uacgucggcauggcugacg

SEQ ID NO: 1666 - RNA, 19 nt, artificial
  RNA for silencing
acgucggcauggcugacga

SEQ ID NO: 1667 - RNA, 19 nt, artificial
  RNA for silencing
cgucggcauggcugacgag

SEQ ID NO: 1668 - RNA, 19 nt, artificial
  RNA for silencing
gucggcauggcugacgaga

SEQ ID NO: 1669 - RNA, 19 nt, artificial
  RNA for silencing
ucggcauggcugacgagau

SEQ ID NO: 1670 - RNA, 19 nt, artificial
  RNA for silencing
cggcauggcugacgagauc

SEQ ID NO: 1671 - RNA, 19 nt, artificial
  RNA for silencing
ggcauggcugacgagaucc

SEQ ID NO: 1672 - RNA, 19 nt, artificial
  RNA for silencing
gcauggcugacgagauccg

SEQ ID NO: 1673 - RNA, 19 nt, artificial
  RNA for silencing
cauggcugacgagauccgc

SEQ ID NO: 1674 - RNA, 19 nt, artificial
  RNA for silencing
auggcugacgagauccgca

SEQ ID NO: 1675 - RNA, 19 nt, artificial
  RNA for silencing
uggcugacgagauccgcaa

SEQ ID NO: 1676 - RNA, 19 nt, artificial
  RNA for silencing
ggcugacgagauccgcaag

SEQ ID NO: 1677 - RNA, 19 nt, artificial
  RNA for silencing
gcugacgagauccgcaagg

SEQ ID NO: 1678 - RNA, 19 nt, artificial
  RNA for silencing
cugacgagauccgcaaggc

SEQ ID NO: 1679 - RNA, 19 nt, artificial
  RNA for silencing
ugacgagauccgcaaggcg

SEQ ID NO: 1680 - RNA, 19 nt, artificial
  RNA for silencing
gacgagauccgcaaggcgc

SEQ ID NO: 1681 - RNA, 19 nt, artificial
  RNA for silencing
acgagauccgcaaggcgca

SEQ ID NO: 1682 - RNA, 19 nt, artificial
  RNA for silencing
cgagauccgcaaggcgcag

SEQ ID NO: 1683 - RNA, 19 nt, artificial
  RNA for silencing
gagauccgcaaggcgcagg

SEQ ID NO: 1684 - RNA, 19 nt, artificial
  RNA for silencing
agauccgcaaggcgcaggc

SEQ ID NO: 1685 - RNA, 19 nt, artificial
  RNA for silencing
gauccgcaaggcgcaggcc

SEQ ID NO: 1686 - RNA, 19 nt, artificial
  RNA for silencing
auccgcaaggcgcaggccg

SEQ ID NO: 1687 - RNA, 19 nt, artificial
  RNA for silencing
uccgcaaggcgcaggccgc

SEQ ID NO: 1688 - RNA, 19 nt, artificial
  RNA for silencing
ccgcaaggcgcaggccgcg

SEQ ID NO: 1689 - RNA, 19 nt, artificial
  RNA for silencing
cgcaaggcgcaggccgcgc

SEQ ID NO: 1690 - RNA, 19 nt, artificial
  RNA for silencing
gcaaggcgcaggccgcgcg

SEQ ID NO: 1691 - RNA, 19 nt, artificial
  RNA for silencing
caaggcgcaggccgcgcgc

SEQ ID NO: 1692 - RNA, 19 nt, artificial
  RNA for silencing
aaggcgcaggccgcgcgcc

SEQ ID NO: 1693 - RNA, 19 nt, artificial
  RNA for silencing
aggcgcaggccgcgcgccc

SEQ ID NO: 1694 - RNA, 19 nt, artificial
  RNA for silencing
ggcgcaggccgcgcgcccu

SEQ ID NO: 1695 - RNA, 19 nt, artificial
  RNA for silencing
gcgcaggccgcgcgcccug

SEQ ID NO: 1696 - RNA, 19 nt, artificial
  RNA for silencing
cgcaggccgcgcgcccugg

SEQ ID NO: 1697 - RNA, 19 nt, artificial
  RNA for silencing
gcaggccgcgcgcccuggu

SEQ ID NO: 1698 - RNA, 19 nt, artificial
  RNA for silencing
caggccgcgcgcccuggug

SEQ ID NO: 1699 - RNA, 19 nt, artificial
  RNA for silencing
aggccgcgcgcccuggugg

SEQ ID NO: 1700 - RNA, 19 nt, artificial
  RNA for silencing
ggccgcgcgcccugguggg

SEQ ID NO: 1701 - RNA, 19 nt, artificial
  RNA for silencing
gccgcgcgcccuggugggg

SEQ ID NO: 1702 - RNA, 19 nt, artificial
  RNA for silencing
ccgcgcgcccuggugggga

SEQ ID NO: 1703 - RNA, 19 nt, artificial
  RNA for silencing
cgcgcgcccugguggggac

SEQ ID NO: 1704 - RNA, 19 nt, artificial
  RNA for silencing
gcgcgcccugguggggaca

SEQ ID NO: 1705 - RNA, 19 nt, artificial
  RNA for silencing
cgcgcccugguggggacac

SEQ ID NO: 1706 - RNA, 19 nt, artificial
  RNA for silencing
gcgcccugguggggacacc

SEQ ID NO: 1707 - RNA, 19 nt, artificial
  RNA for silencing
cgcccugguggggacacca

SEQ ID NO: 1708 - RNA, 19 nt, artificial
  RNA for silencing
gcccugguggggacaccau

SEQ ID NO: 1709 - RNA, 19 nt, artificial
  RNA for silencing
cccugguggggacaccauc

SEQ ID NO: 1710 - RNA, 19 nt, artificial
  RNA for silencing
ccugguggggacaccaucu

SEQ ID NO: 1711 - RNA, 19 nt, artificial
  RNA for silencing
cugguggggacaccaucuu

SEQ ID NO: 1712 - RNA, 19 nt, artificial
  RNA for silencing
ugguggggacaccaucuuc

SEQ ID NO: 1713 - RNA, 19 nt, artificial
  RNA for silencing
gguggggacaccaucuucg

SEQ ID NO: 1714 - RNA, 19 nt, artificial
  RNA for silencing
guggggacaccaucuucgg

SEQ ID NO: 1715 - RNA, 19 nt, artificial
  RNA for silencing
uggggacaccaucuucggg

SEQ ID NO: 1716 - RNA, 19 nt, artificial
  RNA for silencing
ggggacaccaucuucggga

SEQ ID NO: 1717 - RNA, 19 nt, artificial
  RNA for silencing
gggacaccaucuucgggaa

SEQ ID NO: 1718 - RNA, 19 nt, artificial
  RNA for silencing
ggacaccaucuucgggaag

SEQ ID NO: 1719 - RNA, 19 nt, artificial
  RNA for silencing
gacaccaucuucgggaaga

SEQ ID NO: 1720 - RNA, 19 nt, artificial
  RNA for silencing
acaccaucuucgggaagau

SEQ ID NO: 1721 - RNA, 19 nt, artificial
  RNA for silencing
caccaucuucgggaagauu

SEQ ID NO: 1722 - RNA, 19 nt, artificial
  RNA for silencing
accaucuucgggaagauua

SEQ ID NO: 1723 - RNA, 19 nt, artificial
  RNA for silencing
ccaucuucgggaagauuau

SEQ ID NO: 1724 - RNA, 19 nt, artificial
  RNA for silencing
caucuucgggaagauuauc

SEQ ID NO: 1725 - RNA, 19 nt, artificial
  RNA for silencing
aucuucgggaagauuaucc

SEQ ID NO: 1726 - RNA, 19 nt, artificial
  RNA for silencing
ucuucgggaagauuauccg

SEQ ID NO: 1727 - RNA, 19 nt, artificial
  RNA for silencing
cuucgggaagauuauccgc

SEQ ID NO: 1728 - RNA, 19 nt, artificial
  RNA for silencing
uucgggaagauuauccgca

SEQ ID NO: 1729 - RNA, 19 nt, artificial
  RNA for silencing
ucgggaagauuauccgcaa

SEQ ID NO: 1730 - RNA, 19 nt, artificial
  RNA for silencing
cgggaagauuauccgcaag

SEQ ID NO: 1731 - RNA, 19 nt, artificial
  RNA for silencing
gggaagauuauccgcaagg

SEQ ID NO: 1732 - RNA, 19 nt, artificial
  RNA for silencing
ggaagauuauccgcaagga

SEQ ID NO: 1733 - RNA, 19 nt, artificial
  RNA for silencing
gaagauuauccgcaaggag

SEQ ID NO: 1734 - RNA, 19 nt, artificial
  RNA for silencing
aagauuauccgcaaggaga

SEQ ID NO: 1735 - RNA, 19 nt, artificial
  RNA for silencing
agauuauccgcaaggagau

SEQ ID NO: 1736 - RNA, 19 nt, artificial
  RNA for silencing
gauuauccgcaaggagauu

SEQ ID NO: 1737 - RNA, 19 nt, artificial
  RNA for silencing
auuauccgcaaggagauuc

SEQ ID NO: 1738 - RNA, 19 nt, artificial
  RNA for silencing
uuauccgcaaggagauucc

SEQ ID NO: 1739 - RNA, 19 nt, artificial
  RNA for silencing
uauccgcaaggagauuccc

SEQ ID NO: 1740 - RNA, 19 nt, artificial
  RNA for silencing
auccgcaaggagauucccg

SEQ ID NO: 1741 - RNA, 19 nt, artificial
  RNA for silencing
uccgcaaggagauucccgc

SEQ ID NO: 1742 - RNA, 19 nt, artificial
  RNA for silencing
ccgcaaggagauucccgcc

SEQ ID NO: 1743 - RNA, 19 nt, artificial
  RNA for silencing
cgcaaggagauucccgcca

SEQ ID NO: 1744 - RNA, 19 nt, artificial
  RNA for silencing
gcaaggagauucccgccaa

SEQ ID NO: 1745 - RNA, 19 nt, artificial
  RNA for silencing
caaggagauucccgccaac

SEQ ID NO: 1746 - RNA, 19 nt, artificial
  RNA for silencing
aaggagauucccgccaaca

SEQ ID NO: 1747 - RNA, 19 nt, artificial
  RNA for silencing
aggagauucccgccaacau

SEQ ID NO: 1748 - RNA, 19 nt, artificial
  RNA for silencing
ggagauucccgccaacaua

SEQ ID NO: 1749 - RNA, 19 nt, artificial
  RNA for silencing
gagauucccgccaacauaa

SEQ ID NO: 1750 - RNA, 19 nt, artificial
  RNA for silencing
agauucccgccaacauaau

SEQ ID NO: 1751 - RNA, 19 nt, artificial
  RNA for silencing
gauucccgccaacauaauc

SEQ ID NO: 1752 - RNA, 19 nt, artificial
  RNA for silencing
auucccgccaacauaaucu

SEQ ID NO: 1753 - RNA, 19 nt, artificial
  RNA for silencing
uucccgccaacauaaucua

SEQ ID NO: 1754 - RNA, 19 nt, artificial
  RNA for silencing
ucccgccaacauaaucuac

SEQ ID NO: 1755 - RNA, 19 nt, artificial
  RNA for silencing
cccgccaacauaaucuacg

SEQ ID NO: 1756 - RNA, 19 nt, artificial
  RNA for silencing
ccgccaacauaaucuacga

SEQ ID NO: 1757 - RNA, 19 nt, artificial
  RNA for silencing
cgccaacauaaucuacgag

SEQ ID NO: 1758 - RNA, 19 nt, artificial
  RNA for silencing
gccaacauaaucuacgagg

SEQ ID NO: 1759 - RNA, 19 nt, artificial
  RNA for silencing
ccaacauaaucuacgagga

SEQ ID NO: 1760 - RNA, 19 nt, artificial
  RNA for silencing
caacauaaucuacgaggac

SEQ ID NO: 1761 - RNA, 19 nt, artificial
  RNA for silencing
aacauaaucuacgaggacg

SEQ ID NO: 1762 - RNA, 19 nt, artificial
  RNA for silencing
acauaaucuacgaggacga

SEQ ID NO: 1763 - RNA, 19 nt, artificial
  RNA for silencing
cauaaucuacgaggacgag

SEQ ID NO: 1764 - RNA, 19 nt, artificial
  RNA for silencing
auaaucuacgaggacgagc

SEQ ID NO: 1765 - RNA, 19 nt, artificial
  RNA for silencing
uaaucuacgaggacgagca

SEQ ID NO: 1766 - RNA, 19 nt, artificial
  RNA for silencing
aaucuacgaggacgagcag

SEQ ID NO: 1767 - RNA, 19 nt, artificial
  RNA for silencing
aucuacgaggacgagcagu

SEQ ID NO: 1768 - RNA, 19 nt, artificial
  RNA for silencing
ucuacgaggacgagcagug

SEQ ID NO: 1769 - RNA, 19 nt, artificial
  RNA for silencing
cuacgaggacgagcagugc

SEQ ID NO: 1770 - RNA, 19 nt, artificial
  RNA for silencing
uacgaggacgagcagugcc

SEQ ID NO: 1771 - RNA, 19 nt, artificial
  RNA for silencing
acgaggacgagcagugccu

SEQ ID NO: 1772 - RNA, 19 nt, artificial
  RNA for silencing
cgaggacgagcagugccuu

SEQ ID NO: 1773 - RNA, 19 nt, artificial
  RNA for silencing
gaggacgagcagugccuug

SEQ ID NO: 1774 - RNA, 19 nt, artificial
  RNA for silencing
aggacgagcagugccuugc

SEQ ID NO: 1775 - RNA, 19 nt, artificial
  RNA for silencing
ggacgagcagugccuugcg

SEQ ID NO: 1776 - RNA, 19 nt, artificial
  RNA for silencing
gacgagcagugccuugcgu

SEQ ID NO: 1777 - RNA, 19 nt, artificial
  RNA for silencing
acgagcagugccuugcguu

SEQ ID NO: 1778 - RNA, 19 nt, artificial
  RNA for silencing
cgagcagugccuugcguuc

SEQ ID NO: 1779 - RNA, 19 nt, artificial
  RNA for silencing
gagcagugccuugcguucc

SEQ ID NO: 1780 - RNA, 19 nt, artificial
  RNA for silencing
agcagugccuugcguucca

SEQ ID NO: 1781 - RNA, 19 nt, artificial
  RNA for silencing
gcagugccuugcguuccau

SEQ ID NO: 1782 - RNA, 19 nt, artificial
  RNA for silencing
cagugccuugcguuccaug

SEQ ID NO: 1783 - RNA, 19 nt, artificial
  RNA for silencing
agugccuugcguuccauga

SEQ ID NO: 1784 - RNA, 19 nt, artificial
  RNA for silencing
gugccuugcguuccaugau

SEQ ID NO: 1785 - RNA, 19 nt, artificial
  RNA for silencing
ugccuugcguuccaugaua

SEQ ID NO: 1786 - RNA, 19 nt, artificial
  RNA for silencing
gccuugcguuccaugauau

SEQ ID NO: 1787 - RNA, 19 nt, artificial
  RNA for silencing
ccuugcguuccaugauauc

SEQ ID NO: 1788 - RNA, 19 nt, artificial
  RNA for silencing
cuugcguuccaugauaucu

SEQ ID NO: 1789 - RNA, 19 nt, artificial
  RNA for silencing
uugcguuccaugauaucuc

SEQ ID NO: 1790 - RNA, 19 nt, artificial
  RNA for silencing
ugcguuccaugauaucuca

SEQ ID NO: 1791 - RNA, 19 nt, artificial
  RNA for silencing
gcguuccaugauaucucac

SEQ ID NO: 1792 - RNA, 19 nt, artificial
  RNA for silencing
cguuccaugauaucucacc

SEQ ID NO: 1793 - RNA, 19 nt, artificial
  RNA for silencing
guuccaugauaucucaccc

SEQ ID NO: 1794 - RNA, 19 nt, artificial
  RNA for silencing
uuccaugauaucucacccc

SEQ ID NO: 1795 - RNA, 19 nt, artificial
  RNA for silencing
uccaugauaucucacccca

SEQ ID NO: 1796 - RNA, 19 nt, artificial
  RNA for silencing
ccaugauaucucaccccaa

SEQ ID NO: 1797 - RNA, 19 nt, artificial
  RNA for silencing
caugauaucucaccccaag

SEQ ID NO: 1798 - RNA, 19 nt, artificial
  RNA for silencing
augauaucucaccccaagc

SEQ ID NO: 1799 - RNA, 19 nt, artificial
  RNA for silencing
ugauaucucaccccaagcu

SEQ ID NO: 1800 - RNA, 19 nt, artificial
  RNA for silencing
gauaucucaccccaagcuc

SEQ ID NO: 1801 - RNA, 19 nt, artificial
  RNA for silencing
auaucucaccccaagcucc

SEQ ID NO: 1802 - RNA, 19 nt, artificial
  RNA for silencing
uaucucaccccaagcucca

SEQ ID NO: 1803 - RNA, 19 nt, artificial
  RNA for silencing
aucucaccccaagcuccaa

SEQ ID NO: 1804 - RNA, 19 nt, artificial
  RNA for silencing
ucucaccccaagcuccaac

SEQ ID NO: 1805 - RNA, 19 nt, artificial
  RNA for silencing
cucaccccaagcuccaacg

SEQ ID NO: 1806 - RNA, 19 nt, artificial
  RNA for silencing
ucaccccaagcuccaacgc

SEQ ID NO: 1807 - RNA, 19 nt, artificial
  RNA for silencing
caccccaagcuccaacgca

SEQ ID NO: 1808 - RNA, 19 nt, artificial
  RNA for silencing
accccaagcuccaacgcau

SEQ ID NO: 1809 - RNA, 19 nt, artificial
  RNA for silencing
ccccaagcuccaacgcauu

SEQ ID NO: 1810 - RNA, 19 nt, artificial
  RNA for silencing
cccaagcuccaacgcauuu

SEQ ID NO: 1811 - RNA, 19 nt, artificial
  RNA for silencing
ccaagcuccaacgcauuuu

SEQ ID NO: 1812 - RNA, 19 nt, artificial
  RNA for silencing
caagcuccaacgcauuuuc

SEQ ID NO: 1813 - RNA, 19 nt, artificial
  RNA for silencing
aagcuccaacgcauuuucu

SEQ ID NO: 1814 - RNA, 19 nt, artificial
  RNA for silencing
agcuccaacgcauuuucua

SEQ ID NO: 1815 - RNA, 19 nt, artificial
  RNA for silencing
gcuccaacgcauuuucuag

SEQ ID NO: 1816 - RNA, 19 nt, artificial
  RNA for silencing
cuccaacgcauuuucuagu

SEQ ID NO: 1817 - RNA, 19 nt, artificial
  RNA for silencing
uccaacgcauuuucuagug

SEQ ID NO: 1818 - RNA, 19 nt, artificial
  RNA for silencing
ccaacgcauuuucuaguga

SEQ ID NO: 1819 - RNA, 19 nt, artificial
  RNA for silencing
caacgcauuuucuagugau

SEQ ID NO: 1820 - RNA, 19 nt, artificial
  RNA for silencing
aacgcauuuucuagugauu

SEQ ID NO: 1821 - RNA, 19 nt, artificial
  RNA for silencing
acgcauuuucuagugauuc

SEQ ID NO: 1822 - RNA, 19 nt, artificial
  RNA for silencing
cgcauuuucuagugauucc

SEQ ID NO: 1823 - RNA, 19 nt, artificial
  RNA for silencing
gcauuuucuagugauuccu

SEQ ID NO: 1824 - RNA, 19 nt, artificial
  RNA for silencing
cauuuucuagugauuccua

SEQ ID NO: 1825 - RNA, 19 nt, artificial
  RNA for silencing
auuuucuagugauuccuaa

SEQ ID NO: 1826 - RNA, 19 nt, artificial
  RNA for silencing
uuuucuagugauuccuaag

SEQ ID NO: 1827 - RNA, 19 nt, artificial
  RNA for silencing
uuucuagugauuccuaaga

SEQ ID NO: 1828 - RNA, 19 nt, artificial
  RNA for silencing
uucuagugauuccuaagaa

SEQ ID NO: 1829 - RNA, 19 nt, artificial
  RNA for silencing
ucuagugauuccuaagaag

SEQ ID NO: 1830 - RNA, 19 nt, artificial
  RNA for silencing
cuagugauuccuaagaagc

SEQ ID NO: 1831 - RNA, 19 nt, artificial
  RNA for silencing
uagugauuccuaagaagcc

SEQ ID NO: 1832 - RNA, 19 nt, artificial
  RNA for silencing
agugauuccuaagaagcca

SEQ ID NO: 1833 - RNA, 19 nt, artificial
  RNA for silencing
gugauuccuaagaagccaa

SEQ ID NO: 1834 - RNA, 19 nt, artificial
  RNA for silencing
ugauuccuaagaagccaau

SEQ ID NO: 1835 - RNA, 19 nt, artificial
  RNA for silencing
gauuccuaagaagccaauu

SEQ ID NO: 1836 - RNA, 19 nt, artificial
  RNA for silencing
auuccuaagaagccaauug

SEQ ID NO: 1837 - RNA, 19 nt, artificial
  RNA for silencing
uuccuaagaagccaauugu

SEQ ID NO: 1838 - RNA, 19 nt, artificial
  RNA for silencing
uccuaagaagccaauuguc

SEQ ID NO: 1839 - RNA, 19 nt, artificial
  RNA for silencing
ccuaagaagccaauuguca

SEQ ID NO: 1840 - RNA, 19 nt, artificial
  RNA for silencing
cuaagaagccaauugucag

SEQ ID NO: 1841 - RNA, 19 nt, artificial
  RNA for silencing
uaagaagccaauugucagg

SEQ ID NO: 1842 - RNA, 19 nt, artificial
  RNA for silencing
aagaagccaauugucaggu

SEQ ID NO: 1843 - RNA, 19 nt, artificial
  RNA for silencing
agaagccaauugucagguu

SEQ ID NO: 1844 - RNA, 19 nt, artificial
  RNA for silencing
gaagccaauugucagguua

SEQ ID NO: 1845 - RNA, 19 nt, artificial
  RNA for silencing
aagccaauugucagguuau

SEQ ID NO: 1846 - RNA, 19 nt, artificial
  RNA for silencing
agccaauugucagguuauc

SEQ ID NO: 1847 - RNA, 19 nt, artificial
  RNA for silencing
gccaauugucagguuaucu

SEQ ID NO: 1848 - RNA, 19 nt, artificial
  RNA for silencing
ccaauugucagguuaucug

SEQ ID NO: 1849 - RNA, 19 nt, artificial
  RNA for silencing
caauugucagguuaucuga

SEQ ID NO: 1850 - RNA, 19 nt, artificial
  RNA for silencing
aauugucagguuaucugaa

SEQ ID NO: 1851 - RNA, 19 nt, artificial
  RNA for silencing
auugucagguuaucugaag

SEQ ID NO: 1852 - RNA, 19 nt, artificial
  RNA for silencing
uugucagguuaucugaagc

SEQ ID NO: 1853 - RNA, 19 nt, artificial
  RNA for silencing
ugucagguuaucugaagca

SEQ ID NO: 1854 - RNA, 19 nt, artificial
  RNA for silencing
gucagguuaucugaagcag

SEQ ID NO: 1855 - RNA, 19 nt, artificial
  RNA for silencing
ucagguuaucugaagcaga

SEQ ID NO: 1856 - RNA, 19 nt, artificial
  RNA for silencing
cagguuaucugaagcagaa

SEQ ID NO: 1857 - RNA, 19 nt, artificial
  RNA for silencing
agguuaucugaagcagaag

SEQ ID NO: 1858 - RNA, 19 nt, artificial
  RNA for silencing
gguuaucugaagcagaaga

SEQ ID NO: 1859 - RNA, 19 nt, artificial
  RNA for silencing
guuaucugaagcagaagau

SEQ ID NO: 1860 - RNA, 19 nt, artificial
  RNA for silencing
uuaucugaagcagaagauu

SEQ ID NO: 1861 - RNA, 19 nt, artificial
  RNA for silencing
uaucugaagcagaagauuc

SEQ ID NO: 1862 - RNA, 19 nt, artificial
  RNA for silencing
aucugaagcagaagauucu

SEQ ID NO: 1863 - RNA, 19 nt, artificial
  RNA for silencing
ucugaagcagaagauucug

SEQ ID NO: 1864 - RNA, 19 nt, artificial
  RNA for silencing
cugaagcagaagauucuga

SEQ ID NO: 1865 - RNA, 19 nt, artificial
  RNA for silencing
ugaagcagaagauucugau

SEQ ID NO: 1866 - RNA, 19 nt, artificial
  RNA for silencing
gaagcagaagauucugaug

SEQ ID NO: 1867 - RNA, 19 nt, artificial
  RNA for silencing
aagcagaagauucugauga

SEQ ID NO: 1868 - RNA, 19 nt, artificial
  RNA for silencing
agcagaagauucugaugaa

SEQ ID NO: 1869 - RNA, 19 nt, artificial
  RNA for silencing
gcagaagauucugaugaau

SEQ ID NO: 1870 - RNA, 19 nt, artificial
  RNA for silencing
cagaagauucugaugaauc

SEQ ID NO: 1871 - RNA, 19 nt, artificial
  RNA for silencing
agaagauucugaugaaucu

SEQ ID NO: 1872 - RNA, 19 nt, artificial
  RNA for silencing
gaagauucugaugaaucuc

SEQ ID NO: 1873 - RNA, 19 nt, artificial
  RNA for silencing
aagauucugaugaaucucu

SEQ ID NO: 1874 - RNA, 19 nt, artificial
  RNA for silencing
agauucugaugaaucucuu

SEQ ID NO: 1875 - RNA, 19 nt, artificial
  RNA for silencing
gauucugaugaaucucuuc

SEQ ID NO: 1876 - RNA, 19 nt, artificial
  RNA for silencing
auucugaugaaucucuucu

SEQ ID NO: 1877 - RNA, 19 nt, artificial
  RNA for silencing
uucugaugaaucucuucug

SEQ ID NO: 1878 - RNA, 19 nt, artificial
  RNA for silencing
ucugaugaaucucuucugg

SEQ ID NO: 1879 - RNA, 19 nt, artificial
  RNA for silencing
cugaugaaucucuucuggg

SEQ ID NO: 1880 - RNA, 19 nt, artificial
  RNA for silencing
ugaugaaucucuucugggg

SEQ ID NO: 1881 - RNA, 19 nt, artificial
  RNA for silencing
gaugaaucucuucuggggc

SEQ ID NO: 1882 - RNA, 19 nt, artificial
  RNA for silencing
augaaucucuucuggggca

SEQ ID NO: 1883 - RNA, 19 nt, artificial
  RNA for silencing
ugaaucucuucuggggcau

SEQ ID NO: 1884 - RNA, 19 nt, artificial
  RNA for silencing
gaaucucuucuggggcauu

SEQ ID NO: 1885 - RNA, 19 nt, artificial
  RNA for silencing
aaucucuucuggggcauuu

SEQ ID NO: 1886 - RNA, 19 nt, artificial
  RNA for silencing
aucucuucuggggcauuua

SEQ ID NO: 1887 - RNA, 19 nt, artificial
  RNA for silencing
ucucuucuggggcauuuaa

SEQ ID NO: 1888 - RNA, 19 nt, artificial
  RNA for silencing
cucuucuggggcauuuaau

SEQ ID NO: 1889 - RNA, 19 nt, artificial
  RNA for silencing
ucuucuggggcauuuaaug

SEQ ID NO: 1890 - RNA, 19 nt, artificial
  RNA for silencing
cuucuggggcauuuaauga

SEQ ID NO: 1891 - RNA, 19 nt, artificial
  RNA for silencing
uucuggggcauuuaaugau

SEQ ID NO: 1892 - RNA, 19 nt, artificial
  RNA for silencing
ucuggggcauuuaaugauu

SEQ ID NO: 1893 - RNA, 19 nt, artificial
  RNA for silencing
cuggggcauuuaaugauug

SEQ ID NO: 1894 - RNA, 19 nt, artificial
  RNA for silencing
uggggcauuuaaugauugu

SEQ ID NO: 1895 - RNA, 19 nt, artificial
  RNA for silencing
ggggcauuuaaugauuguu

SEQ ID NO: 1896 - RNA, 19 nt, artificial
  RNA for silencing
gggcauuuaaugauuguug

SEQ ID NO: 1897 - RNA, 19 nt, artificial
  RNA for silencing
ggcauuuaaugauuguugg

SEQ ID NO: 1898 - RNA, 19 nt, artificial
  RNA for silencing
gcauuuaaugauuguuggc

SEQ ID NO: 1899 - RNA, 19 nt, artificial
  RNA for silencing
cauuuaaugauuguuggca

SEQ ID NO: 1900 - RNA, 19 nt, artificial
  RNA for silencing
auuuaaugauuguuggcaa

SEQ ID NO: 1901 - RNA, 19 nt, artificial
  RNA for silencing
uuuaaugauuguuggcaag

SEQ ID NO: 1902 - RNA, 19 nt, artificial
  RNA for silencing
uuaaugauuguuggcaaga

SEQ ID NO: 1903 - RNA, 19 nt, artificial
  RNA for silencing
uaaugauuguuggcaagaa

SEQ ID NO: 1904 - RNA, 19 nt, artificial
  RNA for silencing
aaugauuguuggcaagaag

SEQ ID NO: 1905 - RNA, 19 nt, artificial
  RNA for silencing
augauuguuggcaagaagu

SEQ ID NO: 1906 - RNA, 19 nt, artificial
  RNA for silencing
ugauuguuggcaagaagug

SEQ ID NO: 1907 - RNA, 19 nt, artificial
  RNA for silencing
gauuguuggcaagaagugu

SEQ ID NO: 1908 - RNA, 19 nt, artificial
  RNA for silencing
auuguuggcaagaagugug

SEQ ID NO: 1909 - RNA, 19 nt, artificial
  RNA for silencing
uuguuggcaagaagugugc

SEQ ID NO: 1910 - RNA, 19 nt, artificial
  RNA for silencing
uguuggcaagaagugugcu

SEQ ID NO: 1911 - RNA, 19 nt, artificial
  RNA for silencing
guuggcaagaagugugcug

SEQ ID NO: 1912 - RNA, 19 nt, artificial
  RNA for silencing
uuggcaagaagugugcugc

SEQ ID NO: 1913 - RNA, 19 nt, artificial
  RNA for silencing
uggcaagaagugugcugcu

SEQ ID NO: 1914 - RNA, 19 nt, artificial
  RNA for silencing
ggcaagaagugugcugcua

SEQ ID NO: 1915 - RNA, 19 nt, artificial
  RNA for silencing
gcaagaagugugcugcuaa

SEQ ID NO: 1916 - RNA, 19 nt, artificial
  RNA for silencing
caagaagugugcugcuaac

SEQ ID NO: 1917 - RNA, 19 nt, artificial
  RNA for silencing
aagaagugugcugcuaacc

SEQ ID NO: 1918 - RNA, 19 nt, artificial
  RNA for silencing
agaagugugcugcuaaccu

SEQ ID NO: 1919 - RNA, 19 nt, artificial
  RNA for silencing
gaagugugcugcuaaccug

SEQ ID NO: 1920 - RNA, 19 nt, artificial
  RNA for silencing
aagugugcugcuaaccugg

SEQ ID NO: 1921 - RNA, 19 nt, artificial
  RNA for silencing
agugugcugcuaaccuggg

SEQ ID NO: 1922 - RNA, 19 nt, artificial
  RNA for silencing
gugugcugcuaaccugggc

SEQ ID NO: 1923 - RNA, 19 nt, artificial
  RNA for silencing
ugugcugcuaaccugggcc

SEQ ID NO: 1924 - RNA, 19 nt, artificial
  RNA for silencing
gugcugcuaaccugggccu

SEQ ID NO: 1925 - RNA, 19 nt, artificial
  RNA for silencing
ugcugcuaaccugggccug

SEQ ID NO: 1926 - RNA, 19 nt, artificial
  RNA for silencing
gcugcuaaccugggccuga

SEQ ID NO: 1927 - RNA, 19 nt, artificial
  RNA for silencing
cugcuaaccugggccugac

SEQ ID NO: 1928 - RNA, 19 nt, artificial
  RNA for silencing
ugcuaaccugggccugacc

SEQ ID NO: 1929 - RNA, 19 nt, artificial
  RNA for silencing
gcuaaccugggccugacca

SEQ ID NO: 1930 - RNA, 19 nt, artificial
  RNA for silencing
cuaaccugggccugaccaa

SEQ ID NO: 1931 - RNA, 19 nt, artificial
  RNA for silencing
uaaccugggccugaccaau

SEQ ID NO: 1932 - RNA, 19 nt, artificial
  RNA for silencing
aaccugggccugaccaaug

SEQ ID NO: 1933 - RNA, 19 nt, artificial
  RNA for silencing
accugggccugaccaaugg

SEQ ID NO: 1934 - RNA, 19 nt, artificial
  RNA for silencing
ccugggccugaccaaugga

SEQ ID NO: 1935 - RNA, 19 nt, artificial
  RNA for silencing
cugggccugaccaauggau

SEQ ID NO: 1936 - RNA, 19 nt, artificial
  RNA for silencing
ugggccugaccaauggauu

SEQ ID NO: 1937 - RNA, 19 nt, artificial
  RNA for silencing
gggccugaccaauggauuc

SEQ ID NO: 1938 - RNA, 19 nt, artificial
  RNA for silencing
ggccugaccaauggauucc

SEQ ID NO: 1939 - RNA, 19 nt, artificial
  RNA for silencing
gccugaccaauggauuccg

SEQ ID NO: 1940 - RNA, 19 nt, artificial
  RNA for silencing
ccugaccaauggauuccgg

SEQ ID NO: 1941 - RNA, 19 nt, artificial
  RNA for silencing
cugaccaauggauuccgga

SEQ ID NO: 1942 - RNA, 19 nt, artificial
  RNA for silencing
ugaccaauggauuccggau

SEQ ID NO: 1943 - RNA, 19 nt, artificial
  RNA for silencing
gaccaauggauuccggaug

SEQ ID NO: 1944 - RNA, 19 nt, artificial
  RNA for silencing
accaauggauuccggaugg

SEQ ID NO: 1945 - RNA, 19 nt, artificial
  RNA for silencing
ccaauggauuccggauggu

SEQ ID NO: 1946 - RNA, 19 nt, artificial
  RNA for silencing
caauggauuccggaugguu

SEQ ID NO: 1947 - RNA, 19 nt, artificial
  RNA for silencing
aauggauuccggaugguuu

SEQ ID NO: 1948 - RNA, 19 nt, artificial
  RNA for silencing
auggauuccggaugguuuu

SEQ ID NO: 1949 - RNA, 19 nt, artificial
  RNA for silencing
uggauuccggaugguuuug

SEQ ID NO: 1950 - RNA, 19 nt, artificial
  RNA for silencing
ggauuccggaugguuuuga

SEQ ID NO: 1951 - RNA, 19 nt, artificial
  RNA for silencing
gauuccggaugguuuugaa

SEQ ID NO: 1952 - RNA, 19 nt, artificial
  RNA for silencing
auuccggaugguuuugaau

SEQ ID NO: 1953 - RNA, 19 nt, artificial
  RNA for silencing
uuccggaugguuuugaaug

SEQ ID NO: 1954 - RNA, 19 nt, artificial
  RNA for silencing
uccggaugguuuugaauga

SEQ ID NO: 1955 - RNA, 19 nt, artificial
  RNA for silencing
ccggaugguuuugaaugaa

SEQ ID NO: 1956 - RNA, 19 nt, artificial
  RNA for silencing
cggaugguuuugaaugaag

SEQ ID NO: 1957 - RNA, 19 nt, artificial
  RNA for silencing
ggaugguuuugaaugaagg

SEQ ID NO: 1958 - RNA, 19 nt, artificial
  RNA for silencing
gaugguuuugaaugaaggg

SEQ ID NO: 1959 - RNA, 19 nt, artificial
  RNA for silencing
augguuuugaaugaagggc

SEQ ID NO: 1960 - RNA, 19 nt, artificial
  RNA for silencing
ugguuuugaaugaagggcc

SEQ ID NO: 1961 - RNA, 19 nt, artificial
  RNA for silencing
gguuuugaaugaagggccu

SEQ ID NO: 1962 - RNA, 19 nt, artificial
  RNA for silencing
guuuugaaugaagggccug

SEQ ID NO: 1963 - RNA, 19 nt, artificial
  RNA for silencing
uuuugaaugaagggccuga

SEQ ID NO: 1964 - RNA, 19 nt, artificial
  RNA for silencing
uuugaaugaagggccugag

SEQ ID NO: 1965 - RNA, 19 nt, artificial
  RNA for silencing
uugaaugaagggccugagg

SEQ ID NO: 1966 - RNA, 19 nt, artificial
  RNA for silencing
ugaaugaagggccugaggg

SEQ ID NO: 1967 - RNA, 19 nt, artificial
  RNA for silencing
gaaugaagggccugagggu

SEQ ID NO: 1968 - RNA, 19 nt, artificial
  RNA for silencing
aaugaagggccugagggug

SEQ ID NO: 1969 - RNA, 19 nt, artificial
  RNA for silencing
augaagggccugagggugg

SEQ ID NO: 1970 - RNA, 19 nt, artificial
  RNA for silencing
ugaagggccugaggguggg

SEQ ID NO: 1971 - RNA, 19 nt, artificial
  RNA for silencing
gaagggccugagggugggc

SEQ ID NO: 1972 - RNA, 19 nt, artificial
  RNA for silencing
aagggccugagggugggca

SEQ ID NO: 1973 - RNA, 19 nt, artificial
  RNA for silencing
agggccugagggugggcag

SEQ ID NO: 1974 - RNA, 19 nt, artificial
  RNA for silencing
gggccugagggugggcagu

SEQ ID NO: 1975 - RNA, 19 nt, artificial
  RNA for silencing
ggccugagggugggcaguc

SEQ ID NO: 1976 - RNA, 19 nt, artificial
  RNA for silencing
gccugagggugggcagucu

SEQ ID NO: 1977 - RNA, 19 nt, artificial
  RNA for silencing
ccugagggugggcagucug

SEQ ID NO: 1978 - RNA, 19 nt, artificial
  RNA for silencing
cugagggugggcagucugu

SEQ ID NO: 1979 - RNA, 19 nt, artificial
  RNA for silencing
ugagggugggcagucuguc

SEQ ID NO: 1980 - RNA, 19 nt, artificial
  RNA for silencing
gagggugggcagucugucu

SEQ ID NO: 1981 - RNA, 19 nt, artificial
  RNA for silencing
agggugggcagucugucua

SEQ ID NO: 1982 - RNA, 19 nt, artificial
  RNA for silencing
gggugggcagucugucuau

SEQ ID NO: 1983 - RNA, 19 nt, artificial
  RNA for silencing
ggugggcagucugucuauc

SEQ ID NO: 1984 - RNA, 19 nt, artificial
  RNA for silencing
gugggcagucugucuauca

SEQ ID NO: 1985 - RNA, 19 nt, artificial
  RNA for silencing
ugggcagucugucuaucau

SEQ ID NO: 1986 - RNA, 19 nt, artificial
  RNA for silencing
gggcagucugucuaucaug

SEQ ID NO: 1987 - RNA, 19 nt, artificial
  RNA for silencing
ggcagucugucuaucaugu

SEQ ID NO: 1988 - RNA, 19 nt, artificial
  RNA for silencing
gcagucugucuaucaugua

SEQ ID NO: 1989 - RNA, 19 nt, artificial
  RNA for silencing
cagucugucuaucauguac

SEQ ID NO: 1990 - RNA, 19 nt, artificial
  RNA for silencing
agucugucuaucauguaca

SEQ ID NO: 1991 - RNA, 19 nt, artificial
  RNA for silencing
gucugucuaucauguacau

SEQ ID NO: 1992 - RNA, 19 nt, artificial
  RNA for silencing
ucugucuaucauguacauc

SEQ ID NO: 1993 - RNA, 19 nt, artificial
  RNA for silencing
cugucuaucauguacaucu

SEQ ID NO: 1994 - RNA, 19 nt, artificial
  RNA for silencing
ugucuaucauguacaucuc

SEQ ID NO: 1995 - RNA, 19 nt, artificial
  RNA for silencing
gucuaucauguacaucucc

SEQ ID NO: 1996 - RNA, 19 nt, artificial
  RNA for silencing
ucuaucauguacaucucca

SEQ ID NO: 1997 - RNA, 19 nt, artificial
  RNA for silencing
cuaucauguacaucuccau

SEQ ID NO: 1998 - RNA, 19 nt, artificial
  RNA for silencing
uaucauguacaucuccaua

SEQ ID NO: 1999 - RNA, 19 nt, artificial
  RNA for silencing
aucauguacaucuccauau

SEQ ID NO: 2000 - RNA, 19 nt, artificial
  RNA for silencing
ucauguacaucuccauauu

SEQ ID NO: 2001 - RNA, 19 nt, artificial
  RNA for silencing
cauguacaucuccauauuc

SEQ ID NO: 2002 - RNA, 19 nt, artificial
  RNA for silencing
auguacaucuccauauucu

SEQ ID NO: 2003 - RNA, 19 nt, artificial
  RNA for silencing
uguacaucuccauauucug

SEQ ID NO: 2004 - RNA, 19 nt, artificial
  RNA for silencing
guacaucuccauauucugg

SEQ ID NO: 2005 - RNA, 19 nt, artificial
  RNA for silencing
uacaucuccauauucuggg

SEQ ID NO: 2006 - RNA, 19 nt, artificial
  RNA for silencing
acaucuccauauucuggga

SEQ ID NO: 2007 - RNA, 19 nt, artificial
  RNA for silencing
caucuccauauucugggag

SEQ ID NO: 2008 - RNA, 19 nt, artificial
  RNA for silencing
aucuccauauucugggagg

SEQ ID NO: 2009 - RNA, 19 nt, artificial
  RNA for silencing
ucuccauauucugggaggu

SEQ ID NO: 2010 - RNA, 19 nt, artificial
  RNA for silencing
cuccauauucugggagguc

SEQ ID NO: 2011 - RNA, 19 nt, artificial
  RNA for silencing
uccauauucugggaggucg

SEQ ID NO: 2012 - RNA, 19 nt, artificial
  RNA for silencing
ccauauucugggaggucgu

SEQ ID NO: 2013 - RNA, 19 nt, artificial
  RNA for silencing
cauauucugggaggucguc

SEQ ID NO: 2014 - RNA, 19 nt, artificial
  RNA for silencing
auauucugggaggucguca

SEQ ID NO: 2015 - RNA, 19 nt, artificial
  RNA for silencing
uauucugggaggucgucag

SEQ ID NO: 2016 - RNA, 19 nt, artificial
  RNA for silencing
auucugggaggucgucagu

SEQ ID NO: 2017 - RNA, 19 nt, artificial
  RNA for silencing
uucugggaggucgucaguu

SEQ ID NO: 2018 - RNA, 19 nt, artificial
  RNA for silencing
ucugggaggucgucaguug

SEQ ID NO: 2019 - RNA, 19 nt, artificial
  RNA for silencing
cugggaggucgucaguugg

SEQ ID NO: 2020 - RNA, 19 nt, artificial
  RNA for silencing
ugggaggucgucaguuggg

SEQ ID NO: 2021 - RNA, 19 nt, artificial
  RNA for silencing
gggaggucgucaguugggc

SEQ ID NO: 2022 - RNA, 19 nt, artificial
  RNA for silencing
ggaggucgucaguugggcu

SEQ ID NO: 2023 - RNA, 19 nt, artificial
  RNA for silencing
gaggucgucaguugggcug

SEQ ID NO: 2024 - RNA, 19 nt, artificial
  RNA for silencing
aggucgucaguugggcugg

SEQ ID NO: 2025 - RNA, 19 nt, artificial
  RNA for silencing
ggucgucaguugggcuggc

SEQ ID NO: 2026 - RNA, 19 nt, artificial
  RNA for silencing
gucgucaguugggcuggcc

SEQ ID NO: 2027 - RNA, 19 nt, artificial
  RNA for silencing
ucgucaguugggcuggccu

SEQ ID NO: 2028 - RNA, 19 nt, artificial
  RNA for silencing
cgucaguugggcuggccuc

SEQ ID NO: 2029 - RNA, 19 nt, artificial
  RNA for silencing
gucaguugggcuggccucc

SEQ ID NO: 2030 - RNA, 19 nt, artificial
  RNA for silencing
ucaguugggcuggccuccu

SEQ ID NO: 2031 - RNA, 19 nt, artificial
  RNA for silencing
caguugggcuggccuccug

SEQ ID NO: 2032 - RNA, 19 nt, artificial
  RNA for silencing
aguugggcuggccuccugg

SEQ ID NO: 2033 - RNA, 19 nt, artificial
  RNA for silencing
guugggcuggccuccuggc

SEQ ID NO: 2034 - RNA, 19 nt, artificial
  RNA for silencing
uugggcuggccuccuggcu

SEQ ID NO: 2035 - RNA, 19 nt, artificial
  RNA for silencing
ugggcuggccuccuggcua

SEQ ID NO: 2036 - RNA, 19 nt, artificial
  RNA for silencing
gggcuggccuccuggcuaa

SEQ ID NO: 2037 - RNA, 19 nt, artificial
  RNA for silencing
ggcuggccuccuggcuaag

SEQ ID NO: 2038 - RNA, 19 nt, artificial
  RNA for silencing
gcuggccuccuggcuaaga

SEQ ID NO: 2039 - RNA, 19 nt, artificial
  RNA for silencing
cuggccuccuggcuaagau

SEQ ID NO: 2040 - RNA, 19 nt, artificial
  RNA for silencing
uggccuccuggcuaagauu

SEQ ID NO: 2041 - RNA, 19 nt, artificial
  RNA for silencing
ggccuccuggcuaagauuu

SEQ ID NO: 2042 - RNA, 19 nt, artificial
  RNA for silencing
gccuccuggcuaagauuuu

SEQ ID NO: 2043 - RNA, 19 nt, artificial
  RNA for silencing
ccuccuggcuaagauuuuu

SEQ ID NO: 2044 - RNA, 19 nt, artificial
  RNA for silencing
cuccuggcuaagauuuuug

SEQ ID NO: 2045 - RNA, 19 nt, artificial
  RNA for silencing
uccuggcuaagauuuuugc

SEQ ID NO: 2046 - RNA, 19 nt, artificial
  RNA for silencing
ccuggcuaagauuuuugca

SEQ ID NO: 2047 - RNA, 19 nt, artificial
  RNA for silencing
cuggcuaagauuuuugcac

SEQ ID NO: 2048 - RNA, 19 nt, artificial
  RNA for silencing
uggcuaagauuuuugcacc

SEQ ID NO: 2049 - RNA, 19 nt, artificial
  RNA for silencing
ggcuaagauuuuugcacca

SEQ ID NO: 2050 - RNA, 19 nt, artificial
  RNA for silencing
gcuaagauuuuugcaccac

SEQ ID NO: 2051 - RNA, 19 nt, artificial
  RNA for silencing
cuaagauuuuugcaccaca

SEQ ID NO: 2052 - RNA, 19 nt, artificial
  RNA for silencing
uaagauuuuugcaccacaa

SEQ ID NO: 2053 - RNA, 19 nt, artificial
  RNA for silencing
aagauuuuugcaccacaag

SEQ ID NO: 2054 - RNA, 19 nt, artificial
  RNA for silencing
agauuuuugcaccacaaga

SEQ ID NO: 2055 - RNA, 19 nt, artificial
  RNA for silencing
gauuuuugcaccacaagag

SEQ ID NO: 2056 - RNA, 19 nt, artificial
  RNA for silencing
auuuuugcaccacaagaga

SEQ ID NO: 2057 - RNA, 19 nt, artificial
  RNA for silencing
uuuuugcaccacaagagau

SEQ ID NO: 2058 - RNA, 19 nt, artificial
  RNA for silencing
uuuugcaccacaagagaug

SEQ ID NO: 2059 - RNA, 19 nt, artificial
  RNA for silencing
uuugcaccacaagagaugc

SEQ ID NO: 2060 - RNA, 19 nt, artificial
  RNA for silencing
uugcaccacaagagaugcu

SEQ ID NO: 2061 - RNA, 19 nt, artificial
  RNA for silencing
ugcaccacaagagaugcug

SEQ ID NO: 2062 - RNA, 19 nt, artificial
  RNA for silencing
gcaccacaagagaugcugc

SEQ ID NO: 2063 - RNA, 19 nt, artificial
  RNA for silencing
caccacaagagaugcugca

SEQ ID NO: 2064 - RNA, 19 nt, artificial
  RNA for silencing
accacaagagaugcugcau

SEQ ID NO: 2065 - RNA, 19 nt, artificial
  RNA for silencing
ccacaagagaugcugcaug

SEQ ID NO: 2066 - RNA, 19 nt, artificial
  RNA for silencing
cacaagagaugcugcaugu

SEQ ID NO: 2067 - RNA, 19 nt, artificial
  RNA for silencing
acaagagaugcugcaugug

SEQ ID NO: 2068 - RNA, 19 nt, artificial
  RNA for silencing
caagagaugcugcaugugu

SEQ ID NO: 2069 - RNA, 19 nt, artificial
  RNA for silencing
aagagaugcugcaugugua

SEQ ID NO: 2070 - RNA, 19 nt, artificial
  RNA for silencing
agagaugcugcauguguac

SEQ ID NO: 2071 - RNA, 19 nt, artificial
  RNA for silencing
gagaugcugcauguguaca

SEQ ID NO: 2072 - RNA, 19 nt, artificial
  RNA for silencing
agaugcugcauguguacaa

SEQ ID NO: 2073 - RNA, 19 nt, artificial
  RNA for silencing
gaugcugcauguguacaaa

SEQ ID NO: 2074 - RNA, 19 nt, artificial
  RNA for silencing
augcugcauguguacaaau

SEQ ID NO: 2075 - RNA, 19 nt, artificial
  RNA for silencing
ugcugcauguguacaaauc

SEQ ID NO: 2076 - RNA, 19 nt, artificial
  RNA for silencing
gcugcauguguacaaauca

SEQ ID NO: 2077 - RNA, 19 nt, artificial
  RNA for silencing
cugcauguguacaaaucac

SEQ ID NO: 2078 - RNA, 19 nt, artificial
  RNA for silencing
ugcauguguacaaaucacu

SEQ ID NO: 2079 - RNA, 19 nt, artificial
  RNA for silencing
gcauguguacaaaucacua

SEQ ID NO: 2080 - RNA, 19 nt, artificial
  RNA for silencing
cauguguacaaaucacuag

SEQ ID NO: 2081 - RNA, 19 nt, artificial
  RNA for silencing
auguguacaaaucacuagc

SEQ ID NO: 2082 - RNA, 19 nt, artificial
  RNA for silencing
uguguacaaaucacuagca

SEQ ID NO: 2083 - RNA, 19 nt, artificial
  RNA for silencing
guguacaaaucacuagcaa

SEQ ID NO: 2084 - RNA, 19 nt, artificial
  RNA for silencing
uguacaaaucacuagcaaa

SEQ ID NO: 2085 - RNA, 19 nt, artificial
  RNA for silencing
guacaaaucacuagcaaau

SEQ ID NO: 2086 - RNA, 19 nt, artificial
  RNA for silencing
uacaaaucacuagcaaaua

SEQ ID NO: 2087 - RNA, 19 nt, artificial
  RNA for silencing
acaaaucacuagcaaauag

SEQ ID NO: 2088 - RNA, 19 nt, artificial
  RNA for silencing
caaaucacuagcaaauaga

SEQ ID NO: 2089 - RNA, 19 nt, artificial
  RNA for silencing
aaaucacuagcaaauagau

SEQ ID NO: 2090 - RNA, 19 nt, artificial
  RNA for silencing
aaucacuagcaaauagauu

SEQ ID NO: 2091 - RNA, 19 nt, artificial
  RNA for silencing
aucacuagcaaauagauuu

SEQ ID NO: 2092 - RNA, 19 nt, artificial
  RNA for silencing
ucacuagcaaauagauuug

SEQ ID NO: 2093 - RNA, 19 nt, artificial
  RNA for silencing
cacuagcaaauagauuugu

SEQ ID NO: 2094 - RNA, 19 nt, artificial
  RNA for silencing
acuagcaaauagauuuguu

SEQ ID NO: 2095 - RNA, 19 nt, artificial
  RNA for silencing
cuagcaaauagauuuguuu

SEQ ID NO: 2096 - RNA, 19 nt, artificial
  RNA for silencing
uagcaaauagauuuguuuc

SEQ ID NO: 2097 - RNA, 19 nt, artificial
  RNA for silencing
agcaaauagauuuguuucc

SEQ ID NO: 2098 - RNA, 19 nt, artificial
  RNA for silencing
gcaaauagauuuguuuccc

SEQ ID NO: 2099 - RNA, 19 nt, artificial
  RNA for silencing
caaauagauuuguuuccca

SEQ ID NO: 2100 - RNA, 19 nt, artificial
  RNA for silencing
aaauagauuuguuucccau

SEQ ID NO: 2101 - RNA, 19 nt, artificial
  RNA for silencing
aauagauuuguuucccauc

SEQ ID NO: 2102 - RNA, 19 nt, artificial
  RNA for silencing
auagauuuguuucccauca

SEQ ID NO: 2103 - RNA, 19 nt, artificial
  RNA for silencing
uagauuuguuucccaucaa

SEQ ID NO: 2104 - RNA, 19 nt, artificial
  RNA for silencing
agauuuguuucccaucaac

SEQ ID NO: 2105 - RNA, 19 nt, artificial
  RNA for silencing
gauuuguuucccaucaacu

SEQ ID NO: 2106 - RNA, 19 nt, artificial
  RNA for silencing
auuuguuucccaucaacuu

SEQ ID NO: 2107 - RNA, 19 nt, artificial
  RNA for silencing
uuuguuucccaucaacuua

SEQ ID NO: 2108 - RNA, 19 nt, artificial
  RNA for silencing
uuguuucccaucaacuuag

SEQ ID NO: 2109 - RNA, 19 nt, artificial
  RNA for silencing
uguuucccaucaacuuagc

SEQ ID NO: 2110 - RNA, 19 nt, artificial
  RNA for silencing
guuucccaucaacuuagcc

SEQ ID NO: 2111 - RNA, 19 nt, artificial
  RNA for silencing
uuucccaucaacuuagcca

SEQ ID NO: 2112 - RNA, 19 nt, artificial
  RNA for silencing
uucccaucaacuuagccac

SEQ ID NO: 2113 - RNA, 19 nt, artificial
  RNA for silencing
ucccaucaacuuagccacu

SEQ ID NO: 2114 - RNA, 19 nt, artificial
  RNA for silencing
cccaucaacuuagccacug

SEQ ID NO: 2115 - RNA, 19 nt, artificial
  RNA for silencing
ccaucaacuuagccacugu

SEQ ID NO: 2116 - RNA, 19 nt, artificial
  RNA for silencing
caucaacuuagccacuguu

SEQ ID NO: 2117 - RNA, 19 nt, artificial
  RNA for silencing
aucaacuuagccacuguua

SEQ ID NO: 2118 - RNA, 19 nt, artificial
  RNA for silencing
ucaacuuagccacuguuaa

SEQ ID NO: 2119 - RNA, 19 nt, artificial
  RNA for silencing
caacuuagccacuguuaau

SEQ ID NO: 2120 - RNA, 19 nt, artificial
  RNA for silencing
aacuuagccacuguuaaug

SEQ ID NO: 2121 - RNA, 19 nt, artificial
  RNA for silencing
acuuagccacuguuaaugu

SEQ ID NO: 2122 - RNA, 19 nt, artificial
  RNA for silencing
cuuagccacuguuaaugua

SEQ ID NO: 2123 - RNA, 19 nt, artificial
  RNA for silencing
uuagccacuguuaauguaa

SEQ ID NO: 2124 - RNA, 19 nt, artificial
  RNA for silencing
uagccacuguuaauguaaa

SEQ ID NO: 2125 - RNA, 19 nt, artificial
  RNA for silencing
agccacuguuaauguaaau

SEQ ID NO: 2126 - RNA, 19 nt, artificial
  RNA for silencing
gccacuguuaauguaaauu

SEQ ID NO: 2127 - RNA, 19 nt, artificial
  RNA for silencing
ccacuguuaauguaaauug

SEQ ID NO: 2128 - RNA, 19 nt, artificial
  RNA for silencing
cacuguuaauguaaauugu

SEQ ID NO: 2129 - RNA, 19 nt, artificial
  RNA for silencing
acuguuaauguaaauuguu

SEQ ID NO: 2130 - RNA, 19 nt, artificial
  RNA for silencing
cuguuaauguaaauuguuc

SEQ ID NO: 2131 - RNA, 19 nt, artificial
  RNA for silencing
uguuaauguaaauuguucu

SEQ ID NO: 2132 - RNA, 19 nt, artificial
  RNA for silencing
guuaauguaaauuguucuu

SEQ ID NO: 2133 - RNA, 19 nt, artificial
  RNA for silencing
uuaauguaaauuguucuug

SEQ ID NO: 2134 - RNA, 19 nt, artificial
  RNA for silencing
uaauguaaauuguucuugg

SEQ ID NO: 2135 - RNA, 19 nt, artificial
  RNA for silencing
aauguaaauuguucuugga

SEQ ID NO: 2136 - RNA, 19 nt, artificial
  RNA for silencing
auguaaauuguucuuggau

SEQ ID NO: 2137 - RNA, 19 nt, artificial
  RNA for silencing
uguaaauuguucuuggaua

SEQ ID NO: 2138 - RNA, 19 nt, artificial
  RNA for silencing
guaaauuguucuuggauau

SEQ ID NO: 2139 - RNA, 19 nt, artificial
  RNA for silencing
uaaauuguucuuggauaug

SEQ ID NO: 2140 - RNA, 19 nt, artificial
  RNA for silencing
aaauuguucuuggauaugu

SEQ ID NO: 2141 - RNA, 19 nt, artificial
  RNA for silencing
aauuguucuuggauaugug

SEQ ID NO: 2142 - RNA, 19 nt, artificial
  RNA for silencing
auuguucuuggauaugugu

SEQ ID NO: 2143 - RNA, 19 nt, artificial
  RNA for silencing
uuguucuuggauauguguc

SEQ ID NO: 2144 - RNA, 19 nt, artificial
  RNA for silencing
uguucuuggauaugugucu

SEQ ID NO: 2145 - RNA, 19 nt, artificial
  RNA for silencing
guucuuggauaugugucuu

SEQ ID NO: 2146 - RNA, 19 nt, artificial
  RNA for silencing
uucuuggauaugugucuuu

SEQ ID NO: 2147 - RNA, 19 nt, artificial
  RNA for silencing
ucuuggauaugugucuuug

SEQ ID NO: 2148 - RNA, 19 nt, artificial
  RNA for silencing
cuuggauaugugucuuugg

SEQ ID NO: 2149 - RNA, 19 nt, artificial
  RNA for silencing
uuggauaugugucuuugga

SEQ ID NO: 2150 - RNA, 19 nt, artificial
  RNA for silencing
uggauaugugucuuuggag

SEQ ID NO: 2151 - RNA, 19 nt, artificial
  RNA for silencing
ggauaugugucuuuggagg

SEQ ID NO: 2152 - RNA, 19 nt, artificial
  RNA for silencing
gauaugugucuuuggaggg

SEQ ID NO: 2153 - RNA, 19 nt, artificial
  RNA for silencing
auaugugucuuuggagggc

SEQ ID NO: 2154 - RNA, 19 nt, artificial
  RNA for silencing
uaugugucuuuggagggca

SEQ ID NO: 2155 - RNA, 19 nt, artificial
  RNA for silencing
augugucuuuggagggcaa

SEQ ID NO: 2156 - RNA, 19 nt, artificial
  RNA for silencing
ugugucuuuggagggcaau

SEQ ID NO: 2157 - RNA, 19 nt, artificial
  RNA for silencing
gugucuuuggagggcaaua

SEQ ID NO: 2158 - RNA, 19 nt, artificial
  RNA for silencing
ugucuuuggagggcaauaa

SEQ ID NO: 2159 - RNA, 19 nt, artificial
  RNA for silencing
gucuuuggagggcaauaaa

SEQ ID NO: 2160 - RNA, 19 nt, artificial
  RNA for silencing
ucuuuggagggcaauaaau

SEQ ID NO: 2161 - RNA, 19 nt, artificial
  RNA for silencing
cuuuggagggcaauaaaug

SEQ ID NO: 2162 - RNA, 19 nt, artificial
  RNA for silencing
uuuggagggcaauaaaugc

SEQ ID NO: 2163 - RNA, 19 nt, artificial
  RNA for silencing
uuggagggcaauaaaugcu

SEQ ID NO: 2164 - RNA, 19 nt, artificial
  RNA for silencing
uggagggcaauaaaugcuc

SEQ ID NO: 2165 - RNA, 19 nt, artificial
  RNA for silencing
ggagggcaauaaaugcucu

SEQ ID NO: 2166 - RNA, 19 nt, artificial
  RNA for silencing
gagggcaauaaaugcucug

SEQ ID NO: 2167 - RNA, 19 nt, artificial
  RNA for silencing
agggcaauaaaugcucuga

SEQ ID NO: 2168 - RNA, 19 nt, artificial
  RNA for silencing
gggcaauaaaugcucugaa

SEQ ID NO: 2169 - RNA, 19 nt, artificial
  RNA for silencing
ggcaauaaaugcucugaac

SEQ ID NO: 2170 - RNA, 19 nt, artificial
  RNA for silencing
gcaauaaaugcucugaaca

SEQ ID NO: 2171 - RNA, 19 nt, artificial
  RNA for silencing
caauaaaugcucugaacag

SEQ ID NO: 2172 - RNA, 19 nt, artificial
  RNA for silencing
aauaaaugcucugaacagc

SEQ ID NO: 2173 - RNA, 19 nt, artificial
  RNA for silencing
auaaaugcucugaacagca

SEQ ID NO: 2174 - RNA, 19 nt, artificial
  RNA for silencing
uaaaugcucugaacagcac

SEQ ID NO: 2175 - RNA, 19 nt, artificial
  RNA for silencing
aaaugcucugaacagcacu

SEQ ID NO: 2176 - RNA, 19 nt, artificial
  RNA for silencing
aaugcucugaacagcacuu

SEQ ID NO: 2177 - RNA, 19 nt, artificial
  RNA for silencing
augcucugaacagcacuug

SEQ ID NO: 2178 - RNA, 19 nt, artificial
  RNA for silencing
ugcucugaacagcacuugc

SEQ ID NO: 2179 - RNA, 19 nt, artificial
  RNA for silencing
gcucugaacagcacuugca

SEQ ID NO: 2180 - RNA, 19 nt, artificial
  RNA for silencing
cucugaacagcacuugcac

SEQ ID NO: 2181 - RNA, 19 nt, artificial
  RNA for silencing
ucugaacagcacuugcaca

SEQ ID NO: 2182 - RNA, 19 nt, artificial
  RNA for silencing
cugaacagcacuugcacaa

SEQ ID NO: 2183 - RNA, 19 nt, artificial
  RNA for silencing
ugaacagcacuugcacaau

SEQ ID NO: 2184 - RNA, 19 nt, artificial
  RNA for silencing
gaacagcacuugcacaaua

SEQ ID NO: 2185 - RNA, 19 nt, artificial
  RNA for silencing
cacuugcacaauaaagaua

SEQ ID NO: 2186 - RNA, 19 nt, artificial
  RNA for silencing
acuugcacaauaaagauac

SEQ ID NO: 2187 - RNA, 19 nt, artificial
  RNA for silencing
cuugcacaauaaagauaca

SEQ ID NO: 2188 - RNA, 19 nt, artificial
  RNA for silencing
uugcacaauaaagauacag

SEQ ID NO: 2189 - RNA, 19 nt, artificial
  RNA for silencing
ugcacaauaaagauacagc

SEQ ID NO: 2190 - RNA, 19 nt, artificial
  RNA for silencing
gcacaauaaagauacagca

SEQ ID NO: 2191 - RNA, 19 nt, artificial
  RNA for silencing
cacaauaaagauacagcau

SEQ ID NO: 2192 - RNA, 19 nt, artificial
  RNA for silencing
acaauaaagauacagcaug

SEQ ID NO: 2193 - RNA, 19 nt, artificial
  RNA for silencing
caauaaagauacagcaugu

SEQ ID NO: 2194 - RNA, 19 nt, artificial
  RNA for silencing
aauaaagauacagcaugug

SEQ ID NO: 2195 - RNA, 19 nt, artificial
  RNA for silencing
auaaagauacagcaugugg

SEQ ID NO: 2196 - RNA, 19 nt, artificial
  RNA for silencing
uaaagauacagcaugugga

SEQ ID NO: 2197 - RNA, 19 nt, artificial
  RNA for silencing
aaagauacagcauguggaa

SEQ ID NO: 2198 - RNA, 19 nt, artificial
  RNA for silencing
aagauacagcauguggaaa

SEQ ID NO: 2199 - RNA, 19 nt, artificial
  RNA for silencing
agauacagcauguggaaaa

SEQ ID NO: 2200 - RNA, 19 nt, artificial
  RNA for silencing
gauacagcauguggaaaaa

SEQ ID NO: 2201 - RNA, 19 nt, artificial
  RNA for silencing
auacagcauguggaaaaaa

SEQ ID NO: 2202 - RNA, 19 nt, artificial
  RNA for silencing
uacagcauguggaaaaaaa

SEQ ID NO: 2203 - RNA, 19 nt, artificial
  RNA for silencing
acagcauguggaaaaaaaa

SEQ ID NO: 2204 - RNA, 19 nt, artificial
  RNA for silencing
cagcauguggaaaaaaaaa

SEQ ID NO: 2205 - RNA, 19 nt, artificial
  RNA for silencing
agcauguggaaaaaaaaaa

SEQ ID NO: 2206 - RNA, 19 nt, artificial
  RNA for silencing
gcauguggaaaaaaaaaaa

SEQ ID NO: 2207 - RNA, 19 nt, artificial
  RNA for silencing
cauguggaaaaaaaaaaaa

SEQ ID NO: 2208 - RNA, 19 nt, artificial
  RNA for silencing
auguggaaaaaaaaaaaaa

SEQ ID NO: 2209 - RNA, 19 nt, artificial
  RNA for silencing
uguggaaaaaaaaaaaaaa

SEQ ID NO: 2210 - RNA, 19 nt, artificial
  RNA for silencing
auggaucuaacaggcggca

SEQ ID NO: 2211 - RNA, 19 nt, artificial
  RNA for silencing
uggaucuaacaggcggcag

SEQ ID NO: 2212 - RNA, 19 nt, artificial
  RNA for silencing
ggaucuaacaggcggcagc

SEQ ID NO: 2213 - RNA, 19 nt, artificial
  RNA for silencing
gaucuaacaggcggcagca

SEQ ID NO: 2214 - RNA, 19 nt, artificial
  RNA for silencing
aucuaacaggcggcagcaa

SEQ ID NO: 2215 - RNA, 19 nt, artificial
  RNA for silencing
ucuaacaggcggcagcaaa

SEQ ID NO: 2216 - RNA, 19 nt, artificial
  RNA for silencing
cuaacaggcggcagcaaag

SEQ ID NO: 2217 - RNA, 19 nt, artificial
  RNA for silencing
uaacaggcggcagcaaagu

SEQ ID NO: 2218 - RNA, 19 nt, artificial
  RNA for silencing
aacaggcggcagcaaagug

SEQ ID NO: 2219 - RNA, 19 nt, artificial
  RNA for silencing
acaggcggcagcaaagugg

SEQ ID NO: 2220 - RNA, 19 nt, artificial
  RNA for silencing
caggcggcagcaaaguggu

SEQ ID NO: 2221 - RNA, 19 nt, artificial
  RNA for silencing
aggcggcagcaaaguggug

SEQ ID NO: 2222 - RNA, 19 nt, artificial
  RNA for silencing
ggcggcagcaaagugguga

SEQ ID NO: 2223 - RNA, 19 nt, artificial
  RNA for silencing
gcggcagcaaaguggugaa

SEQ ID NO: 2224 - RNA, 19 nt, artificial
  RNA for silencing
cggcagcaaaguggugaag

SEQ ID NO: 2225 - RNA, 19 nt, artificial
  RNA for silencing
ggcagcaaaguggugaagg

SEQ ID NO: 2226 - RNA, 19 nt, artificial
  RNA for silencing
gcagcaaaguggugaaggg

SEQ ID NO: 2227 - RNA, 19 nt, artificial
  RNA for silencing
cagcaaaguggugaagggc

SEQ ID NO: 2228 - RNA, 19 nt, artificial
  RNA for silencing
agcaaaguggugaagggca

SEQ ID NO: 2229 - RNA, 19 nt, artificial
  RNA for silencing
gcaaaguggugaagggcaa

SEQ ID NO: 2230 - RNA, 19 nt, artificial
  RNA for silencing
caaaguggugaagggcaag

SEQ ID NO: 2231 - RNA, 19 nt, artificial
  RNA for silencing
aaaguggugaagggcaaga

SEQ ID NO: 2232 - RNA, 19 nt, artificial
  RNA for silencing
aaguggugaagggcaagag

SEQ ID NO: 2233 - RNA, 19 nt, artificial
  RNA for silencing
aguggugaagggcaagagg

SEQ ID NO: 2234 - RNA, 19 nt, artificial
  RNA for silencing
guggugaagggcaagaggc

SEQ ID NO: 2235 - RNA, 19 nt, artificial
  RNA for silencing
uggugaagggcaagaggca

SEQ ID NO: 2236 - RNA, 19 nt, artificial
  RNA for silencing
ggugaagggcaagaggcaa

SEQ ID NO: 2237 - RNA, 19 nt, artificial
  RNA for silencing
gugaagggcaagaggcaaa

SEQ ID NO: 2238 - RNA, 19 nt, artificial
  RNA for silencing
ugaagggcaagaggcaaag

SEQ ID NO: 2239 - RNA, 19 nt, artificial
  RNA for silencing
gaagggcaagaggcaaagg

SEQ ID NO: 2240 - RNA, 19 nt, artificial
  RNA for silencing
aagggcaagaggcaaaggc

SEQ ID NO: 2241 - RNA, 19 nt, artificial
  RNA for silencing
agggcaagaggcaaaggcg

SEQ ID NO: 2242 - RNA, 19 nt, artificial
  RNA for silencing
gggcaagaggcaaaggcga

SEQ ID NO: 2243 - RNA, 19 nt, artificial
  RNA for silencing
ggcaagaggcaaaggcgaa

SEQ ID NO: 2244 - RNA, 19 nt, artificial
  RNA for silencing
gcaagaggcaaaggcgaau

SEQ ID NO: 2245 - RNA, 19 nt, artificial
  RNA for silencing
caagaggcaaaggcgaauu

SEQ ID NO: 2246 - RNA, 19 nt, artificial
  RNA for silencing
aagaggcaaaggcgaauua

SEQ ID NO: 2247 - RNA, 19 nt, artificial
  RNA for silencing
agaggcaaaggcgaauuag

SEQ ID NO: 2248 - RNA, 19 nt, artificial
  RNA for silencing
gaggcaaaggcgaauuagc

SEQ ID NO: 2249 - RNA, 19 nt, artificial
  RNA for silencing
aggcaaaggcgaauuagca

SEQ ID NO: 2250 - RNA, 19 nt, artificial
  RNA for silencing
ggcaaaggcgaauuagcac

SEQ ID NO: 2251 - RNA, 19 nt, artificial
  RNA for silencing
gcaaaggcgaauuagcacu

SEQ ID NO: 2252 - RNA, 19 nt, artificial
  RNA for silencing
caaaggcgaauuagcacug

SEQ ID NO: 2253 - RNA, 19 nt, artificial
  RNA for silencing
aaaggcgaauuagcacuga

SEQ ID NO: 2254 - RNA, 19 nt, artificial
  RNA for silencing
aaggcgaauuagcacugag

SEQ ID NO: 2255 - RNA, 19 nt, artificial
  RNA for silencing
aggcgaauuagcacugagc

SEQ ID NO: 2256 - RNA, 19 nt, artificial
  RNA for silencing
ggcgaauuagcacugagcu

SEQ ID NO: 2257 - RNA, 19 nt, artificial
  RNA for silencing
gcgaauuagcacugagcug

SEQ ID NO: 2258 - RNA, 19 nt, artificial
  RNA for silencing
cgaauuagcacugagcuga

SEQ ID NO: 2259 - RNA, 19 nt, artificial
  RNA for silencing
gaauuagcacugagcugag

SEQ ID NO: 2260 - RNA, 19 nt, artificial
  RNA for silencing
aauuagcacugagcugagc

SEQ ID NO: 2261 - RNA, 19 nt, artificial
  RNA for silencing
auuagcacugagcugagcc

SEQ ID NO: 2262 - RNA, 19 nt, artificial
  RNA for silencing
uuagcacugagcugagcca

SEQ ID NO: 2263 - RNA, 19 nt, artificial
  RNA for silencing
uagcacugagcugagccag

SEQ ID NO: 2264 - RNA, 19 nt, artificial
  RNA for silencing
agcacugagcugagccagg

SEQ ID NO: 2265 - RNA, 19 nt, artificial
  RNA for silencing
gcacugagcugagccaggg

SEQ ID NO: 2266 - RNA, 19 nt, artificial
  RNA for silencing
cacugagcugagccagggc

SEQ ID NO: 2267 - RNA, 19 nt, artificial
  RNA for silencing
acugagcugagccagggcu

SEQ ID NO: 2268 - RNA, 19 nt, artificial
  RNA for silencing
cugagcugagccagggcug

SEQ ID NO: 2269 - RNA, 19 nt, artificial
  RNA for silencing
ugagcugagccagggcugu

SEQ ID NO: 2270 - RNA, 19 nt, artificial
  RNA for silencing
gagcugagccagggcugug

SEQ ID NO: 2271 - RNA, 19 nt, artificial
  RNA for silencing
agcugagccagggcugugc

SEQ ID NO: 2272 - RNA, 19 nt, artificial
  RNA for silencing
gcugagccagggcugugcc

SEQ ID NO: 2273 - RNA, 19 nt, artificial
  RNA for silencing
cugagccagggcugugcca

SEQ ID NO: 2274 - RNA, 19 nt, artificial
  RNA for silencing
ugagccagggcugugccag

SEQ ID NO: 2275 - RNA, 19 nt, artificial
  RNA for silencing
gagccagggcugugccagg

SEQ ID NO: 2276 - RNA, 19 nt, artificial
  RNA for silencing
agccagggcugugccaggg

SEQ ID NO: 2277 - RNA, 19 nt, artificial
  RNA for silencing
gccagggcugugccagggg

SEQ ID NO: 2278 - RNA, 19 nt, artificial
  RNA for silencing
ccagggcugugccaggggc

SEQ ID NO: 2279 - RNA, 19 nt, artificial
  RNA for silencing
cagggcugugccaggggcu

SEQ ID NO: 2280 - RNA, 19 nt, artificial
  RNA for silencing
agggcugugccaggggcug

SEQ ID NO: 2281 - RNA, 19 nt, artificial
  RNA for silencing
gggcugugccaggggcugc

SEQ ID NO: 2282 - RNA, 19 nt, artificial
  RNA for silencing
ggcugugccaggggcugcg

SEQ ID NO: 2283 - RNA, 19 nt, artificial
  RNA for silencing
gcugugccaggggcugcga

SEQ ID NO: 2284 - RNA, 19 nt, artificial
  RNA for silencing
cugugccaggggcugcgac

SEQ ID NO: 2285 - RNA, 19 nt, artificial
  RNA for silencing
ugugccaggggcugcgacc

SEQ ID NO: 2286 - RNA, 19 nt, artificial
  RNA for silencing
gugccaggggcugcgaccu

SEQ ID NO: 2287 - RNA, 19 nt, artificial
  RNA for silencing
ugccaggggcugcgaccug

SEQ ID NO: 2288 - RNA, 19 nt, artificial
  RNA for silencing
gccaggggcugcgaccugu

SEQ ID NO: 2289 - RNA, 19 nt, artificial
  RNA for silencing
ccaggggcugcgaccugug

SEQ ID NO: 2290 - RNA, 19 nt, artificial
  RNA for silencing
caggggcugcgaccugugc

SEQ ID NO: 2291 - RNA, 19 nt, artificial
  RNA for silencing
aggggcugcgaccugugcu

SEQ ID NO: 2292 - RNA, 19 nt, artificial
  RNA for silencing
ggggcugcgaccugugcuc

SEQ ID NO: 2293 - RNA, 19 nt, artificial
  RNA for silencing
gggcugcgaccugugcucu

SEQ ID NO: 2294 - RNA, 19 nt, artificial
  RNA for silencing
ggcugcgaccugugcucug

SEQ ID NO: 2295 - RNA, 19 nt, artificial
  RNA for silencing
gcugcgaccugugcucuga

SEQ ID NO: 2296 - RNA, 19 nt, artificial
  RNA for silencing
cugcgaccugugcucugag

SEQ ID NO: 2297 - RNA, 19 nt, artificial
  RNA for silencing
ugcgaccugugcucugagu

SEQ ID NO: 2298 - RNA, 19 nt, artificial
  RNA for silencing
gcgaccugugcucugaguu

SEQ ID NO: 2299 - RNA, 19 nt, artificial
  RNA for silencing
cgaccugugcucugaguuc

SEQ ID NO: 2300 - RNA, 19 nt, artificial
  RNA for silencing
gaccugugcucugaguuca

SEQ ID NO: 2301 - RNA, 19 nt, artificial
  RNA for silencing
accugugcucugaguucaa

SEQ ID NO: 2302 - RNA, 19 nt, artificial
  RNA for silencing
ccugugcucugaguucaac

SEQ ID NO: 2303 - RNA, 19 nt, artificial
  RNA for silencing
cugugcucugaguucaacg

SEQ ID NO: 2304 - RNA, 19 nt, artificial
  RNA for silencing
ugugcucugaguucaacgg

SEQ ID NO: 2305 - RNA, 19 nt, artificial
  RNA for silencing
gugcucugaguucaacggg

SEQ ID NO: 2306 - RNA, 19 nt, artificial
  RNA for silencing
ugcucugaguucaacgggu

SEQ ID NO: 2307 - RNA, 19 nt, artificial
  RNA for silencing
gcucugaguucaacgggug

SEQ ID NO: 2308 - RNA, 19 nt, artificial
  RNA for silencing
cucugaguucaacgggugc

SEQ ID NO: 2309 - RNA, 19 nt, artificial
  RNA for silencing
ucugaguucaacgggugcc

SEQ ID NO: 2310 - RNA, 19 nt, artificial
  RNA for silencing
cugaguucaacgggugccu

SEQ ID NO: 2311 - RNA, 19 nt, artificial
  RNA for silencing
ugaguucaacgggugccug

SEQ ID NO: 2312 - RNA, 19 nt, artificial
  RNA for silencing
gaguucaacgggugccuga

SEQ ID NO: 2313 - RNA, 19 nt, artificial
  RNA for silencing
aguucaacgggugccugag

SEQ ID NO: 2314 - RNA, 19 nt, artificial
  RNA for silencing
guucaacgggugccugaga

SEQ ID NO: 2315 - RNA, 19 nt, artificial
  RNA for silencing
uucaacgggugccugagau

SEQ ID NO: 2316 - RNA, 19 nt, artificial
  RNA for silencing
ucaacgggugccugagaug

SEQ ID NO: 2317 - RNA, 19 nt, artificial
  RNA for silencing
caacgggugccugagaugu

SEQ ID NO: 2318 - RNA, 19 nt, artificial
  RNA for silencing
aacgggugccugagauguu

SEQ ID NO: 2319 - RNA, 19 nt, artificial
  RNA for silencing
acgggugccugagauguuc

SEQ ID NO: 2320 - RNA, 19 nt, artificial
  RNA for silencing
cgggugccugagauguucc

SEQ ID NO: 2321 - RNA, 19 nt, artificial
  RNA for silencing
gggugccugagauguuccc

SEQ ID NO: 2322 - RNA, 19 nt, artificial
  RNA for silencing
ggugccugagauguucccc

SEQ ID NO: 2323 - RNA, 19 nt, artificial
  RNA for silencing
gugccugagauguuccccc

SEQ ID NO: 2324 - RNA, 19 nt, artificial
  RNA for silencing
ugccugagauguuccccca

SEQ ID NO: 2325 - RNA, 19 nt, artificial
  RNA for silencing
gccugagauguucccccaa

SEQ ID NO: 2326 - RNA, 19 nt, artificial
  RNA for silencing
ccugagauguucccccaag

SEQ ID NO: 2327 - RNA, 19 nt, artificial
  RNA for silencing
cugagauguucccccaagc

SEQ ID NO: 2328 - RNA, 19 nt, artificial
  RNA for silencing
ugagauguucccccaagcu

SEQ ID NO: 2329 - RNA, 19 nt, artificial
  RNA for silencing
gagauguucccccaagcuc

SEQ ID NO: 2330 - RNA, 19 nt, artificial
  RNA for silencing
agauguucccccaagcucu

SEQ ID NO: 2331 - RNA, 19 nt, artificial
  RNA for silencing
gauguucccccaagcucuu

SEQ ID NO: 2332 - RNA, 19 nt, artificial
  RNA for silencing
auguucccccaagcucuuc

SEQ ID NO: 2333 - RNA, 19 nt, artificial
  RNA for silencing
uguucccccaagcucuuca

SEQ ID NO: 2334 - RNA, 19 nt, artificial
  RNA for silencing
guucccccaagcucuucau

SEQ ID NO: 2335 - RNA, 19 nt, artificial
  RNA for silencing
uucccccaagcucuucauc

SEQ ID NO: 2336 - RNA, 19 nt, artificial
  RNA for silencing
ucccccaagcucuucaucc

SEQ ID NO: 2337 - RNA, 19 nt, artificial
  RNA for silencing
cccccaagcucuucauccu

SEQ ID NO: 2338 - RNA, 19 nt, artificial
  RNA for silencing
ccccaagcucuucauccuu

SEQ ID NO: 2339 - RNA, 19 nt, artificial
  RNA for silencing
cccaagcucuucauccuuc

SEQ ID NO: 2340 - RNA, 19 nt, artificial
  RNA for silencing
ccaagcucuucauccuucu

SEQ ID NO: 2341 - RNA, 19 nt, artificial
  RNA for silencing
caagcucuucauccuucug

SEQ ID NO: 2342 - RNA, 19 nt, artificial
  RNA for silencing
aagcucuucauccuucugg

SEQ ID NO: 2343 - RNA, 19 nt, artificial
  RNA for silencing
agcucuucauccuucugga

SEQ ID NO: 2344 - RNA, 19 nt, artificial
  RNA for silencing
gcucuucauccuucuggag

SEQ ID NO: 2345 - RNA, 19 nt, artificial
  RNA for silencing
cucuucauccuucuggaga

SEQ ID NO: 2346 - RNA, 19 nt, artificial
  RNA for silencing
ucuucauccuucuggagag

SEQ ID NO: 2347 - RNA, 19 nt, artificial
  RNA for silencing
cuucauccuucuggagagg

SEQ ID NO: 2348 - RNA, 19 nt, artificial
  RNA for silencing
uucauccuucuggagagga

SEQ ID NO: 2349 - RNA, 19 nt, artificial
  RNA for silencing
ucauccuucuggagaggaa

SEQ ID NO: 2350 - RNA, 19 nt, artificial
  RNA for silencing
cauccuucuggagaggaac

SEQ ID NO: 2351 - RNA, 19 nt, artificial
  RNA for silencing
auccuucuggagaggaacg

SEQ ID NO: 2352 - RNA, 19 nt, artificial
  RNA for silencing
uccuucuggagaggaacga

SEQ ID NO: 2353 - RNA, 19 nt, artificial
  RNA for silencing
ccuucuggagaggaacgau

SEQ ID NO: 2354 - RNA, 19 nt, artificial
  RNA for silencing
cuucuggagaggaacgaua

SEQ ID NO: 2355 - RNA, 19 nt, artificial
  RNA for silencing
uucuggagaggaacgauau

SEQ ID NO: 2356 - RNA, 19 nt, artificial
  RNA for silencing
ucuggagaggaacgauauc

SEQ ID NO: 2357 - RNA, 19 nt, artificial
  RNA for silencing
cuggagaggaacgauaucc

SEQ ID NO: 2358 - RNA, 19 nt, artificial
  RNA for silencing
uggagaggaacgauauccg

SEQ ID NO: 2359 - RNA, 19 nt, artificial
  RNA for silencing
ggagaggaacgauauccgg

SEQ ID NO: 2360 - RNA, 19 nt, artificial
  RNA for silencing
gagaggaacgauauccggc

SEQ ID NO: 2361 - RNA, 19 nt, artificial
  RNA for silencing
agaggaacgauauccggca

SEQ ID NO: 2362 - RNA, 19 nt, artificial
  RNA for silencing
gaggaacgauauccggcaa

SEQ ID NO: 2363 - RNA, 19 nt, artificial
  RNA for silencing
aggaacgauauccggcaaa

SEQ ID NO: 2364 - RNA, 19 nt, artificial
  RNA for silencing
ggaacgauauccggcaaau

SEQ ID NO: 2365 - RNA, 19 nt, artificial
  RNA for silencing
gaacgauauccggcaaauu

SEQ ID NO: 2366 - RNA, 19 nt, artificial
  RNA for silencing
aacgauauccggcaaauug

SEQ ID NO: 2367 - RNA, 19 nt, artificial
  RNA for silencing
acgauauccggcaaauugg

SEQ ID NO: 2368 - RNA, 19 nt, artificial
  RNA for silencing
cgauauccggcaaauuggg

SEQ ID NO: 2369 - RNA, 19 nt, artificial
  RNA for silencing
gauauccggcaaauuggga

SEQ ID NO: 2370 - RNA, 19 nt, artificial
  RNA for silencing
auauccggcaaauugggau

SEQ ID NO: 2371 - RNA, 19 nt, artificial
  RNA for silencing
uauccggcaaauugggauc

SEQ ID NO: 2372 - RNA, 19 nt, artificial
  RNA for silencing
auccggcaaauugggaucu

SEQ ID NO: 2373 - RNA, 19 nt, artificial
  RNA for silencing
uccggcaaauugggaucug

SEQ ID NO: 2374 - RNA, 19 nt, artificial
  RNA for silencing
ccggcaaauugggaucugc

SEQ ID NO: 2375 - RNA, 19 nt, artificial
  RNA for silencing
cggcaaauugggaucugcc

SEQ ID NO: 2376 - RNA, 19 nt, artificial
  RNA for silencing
ggcaaauugggaucugccu

SEQ ID NO: 2377 - RNA, 19 nt, artificial
  RNA for silencing
gcaaauugggaucugccuc

SEQ ID NO: 2378 - RNA, 19 nt, artificial
  RNA for silencing
caaauugggaucugccucc

SEQ ID NO: 2379 - RNA, 19 nt, artificial
  RNA for silencing
aaauugggaucugccuccc

SEQ ID NO: 2380 - RNA, 19 nt, artificial
  RNA for silencing
aauugggaucugccuccca

SEQ ID NO: 2381 - RNA, 19 nt, artificial
  RNA for silencing
auugggaucugccucccau

SEQ ID NO: 2382 - RNA, 19 nt, artificial
  RNA for silencing
uugggaucugccucccauc

SEQ ID NO: 2383 - RNA, 19 nt, artificial
  RNA for silencing
ugggaucugccucccaucc

SEQ ID NO: 2384 - RNA, 19 nt, artificial
  RNA for silencing
gggaucugccucccauccu

SEQ ID NO: 2385 - RNA, 19 nt, artificial
  RNA for silencing
ggaucugccucccauccug

SEQ ID NO: 2386 - RNA, 19 nt, artificial
  RNA for silencing
gaucugccucccauccugu

SEQ ID NO: 2387 - RNA, 19 nt, artificial
  RNA for silencing
aucugccucccauccuguc

SEQ ID NO: 2388 - RNA, 19 nt, artificial
  RNA for silencing
ucugccucccauccugucc

SEQ ID NO: 2389 - RNA, 19 nt, artificial
  RNA for silencing
cugccucccauccugucca

SEQ ID NO: 2390 - RNA, 19 nt, artificial
  RNA for silencing
ugccucccauccuguccac

SEQ ID NO: 2391 - RNA, 19 nt, artificial
  RNA for silencing
gccucccauccuguccacu

SEQ ID NO: 2392 - RNA, 19 nt, artificial
  RNA for silencing
ccucccauccuguccacug

SEQ ID NO: 2393 - RNA, 19 nt, artificial
  RNA for silencing
cucccauccuguccacugg

SEQ ID NO: 2394 - RNA, 19 nt, artificial
  RNA for silencing
ucccauccuguccacuggg

SEQ ID NO: 2395 - RNA, 19 nt, artificial
  RNA for silencing
cccauccuguccacuggga

SEQ ID NO: 2396 - RNA, 19 nt, artificial
  RNA for silencing
ccauccuguccacugggau

SEQ ID NO: 2397 - RNA, 19 nt, artificial
  RNA for silencing
cauccuguccacugggaua

SEQ ID NO: 2398 - RNA, 19 nt, artificial
  RNA for silencing
auccuguccacugggauac

SEQ ID NO: 2399 - RNA, 19 nt, artificial
  RNA for silencing
uccuguccacugggauacu

SEQ ID NO: 2400 - RNA, 19 nt, artificial
  RNA for silencing
ccuguccacugggauacuu

SEQ ID NO: 2401 - RNA, 19 nt, artificial
  RNA for silencing
cuguccacugggauacuuu

SEQ ID NO: 2402 - RNA, 19 nt, artificial
  RNA for silencing
uguccacugggauacuuug

SEQ ID NO: 2403 - RNA, 19 nt, artificial
  RNA for silencing
guccacugggauacuuugg

SEQ ID NO: 2404 - RNA, 19 nt, artificial
  RNA for silencing
uccacugggauacuuuggc

SEQ ID NO: 2405 - RNA, 19 nt, artificial
  RNA for silencing
ccacugggauacuuuggcc

SEQ ID NO: 2406 - RNA, 19 nt, artificial
  RNA for silencing
cacugggauacuuuggccu

SEQ ID NO: 2407 - RNA, 19 nt, artificial
  RNA for silencing
acugggauacuuuggccuu

SEQ ID NO: 2408 - RNA, 19 nt, artificial
  RNA for silencing
cugggauacuuuggccuuc

SEQ ID NO: 2409 - RNA, 19 nt, artificial
  RNA for silencing
ugggauacuuuggccuucg

SEQ ID NO: 2410 - RNA, 19 nt, artificial
  RNA for silencing
gggauacuuuggccuucgc

SEQ ID NO: 2411 - RNA, 19 nt, artificial
  RNA for silencing
ggauacuuuggccuucgca

SEQ ID NO: 2412 - RNA, 19 nt, artificial
  RNA for silencing
gauacuuuggccuucgcaa

SEQ ID NO: 2413 - RNA, 19 nt, artificial
  RNA for silencing
auacuuuggccuucgcaau

SEQ ID NO: 2414 - RNA, 19 nt, artificial
  RNA for silencing
uacuuuggccuucgcaaua

SEQ ID NO: 2415 - RNA, 19 nt, artificial
  RNA for silencing
acuuuggccuucgcaauac

SEQ ID NO: 2416 - RNA, 19 nt, artificial
  RNA for silencing
cuuuggccuucgcaauaca

SEQ ID NO: 2417 - RNA, 19 nt, artificial
  RNA for silencing
uuuggccuucgcaauacag

SEQ ID NO: 2418 - RNA, 19 nt, artificial
  RNA for silencing
uuggccuucgcaauacaga

SEQ ID NO: 2419 - RNA, 19 nt, artificial
  RNA for silencing
uggccuucgcaauacagac

SEQ ID NO: 2420 - RNA, 19 nt, artificial
  RNA for silencing
ggccuucgcaauacagaca

SEQ ID NO: 2421 - RNA, 19 nt, artificial
  RNA for silencing
gccuucgcaauacagacau

SEQ ID NO: 2422 - RNA, 19 nt, artificial
  RNA for silencing
ccuucgcaauacagacaug

SEQ ID NO: 2423 - RNA, 19 nt, artificial
  RNA for silencing
cuucgcaauacagacauga

SEQ ID NO: 2424 - RNA, 19 nt, artificial
  RNA for silencing
uucgcaauacagacaugaa

SEQ ID NO: 2425 - RNA, 19 nt, artificial
  RNA for silencing
ucgcaauacagacaugaac

SEQ ID NO: 2426 - RNA, 19 nt, artificial
  RNA for silencing
cgcaauacagacaugaaca

SEQ ID NO: 2427 - RNA, 19 nt, artificial
  RNA for silencing
gcaauacagacaugaacaa

SEQ ID NO: 2428 - RNA, 19 nt, artificial
  RNA for silencing
caauacagacaugaacaag

SEQ ID NO: 2429 - RNA, 19 nt, artificial
  RNA for silencing
aauacagacaugaacaagu

SEQ ID NO: 2430 - RNA, 19 nt, artificial
  RNA for silencing
auacagacaugaacaagug

SEQ ID NO: 2431 - RNA, 19 nt, artificial
  RNA for silencing
uacagacaugaacaagugc

SEQ ID NO: 2432 - RNA, 19 nt, artificial
  RNA for silencing
acagacaugaacaagugca

SEQ ID NO: 2433 - RNA, 19 nt, artificial
  RNA for silencing
cagacaugaacaagugcau

SEQ ID NO: 2434 - RNA, 19 nt, artificial
  RNA for silencing
agacaugaacaagugcauc

SEQ ID NO: 2435 - RNA, 19 nt, artificial
  RNA for silencing
gacaugaacaagugcauca

SEQ ID NO: 2436 - RNA, 19 nt, artificial
  RNA for silencing
acaugaacaagugcaucaa

SEQ ID NO: 2437 - RNA, 19 nt, artificial
  RNA for silencing
caugaacaagugcaucaaa

SEQ ID NO: 2438 - RNA, 19 nt, artificial
  RNA for silencing
augaacaagugcaucaaau

SEQ ID NO: 2439 - RNA, 19 nt, artificial
  RNA for silencing
ugaacaagugcaucaaaug

SEQ ID NO: 2440 - RNA, 19 nt, artificial
  RNA for silencing
gaacaagugcaucaaaugc

SEQ ID NO: 2441 - RNA, 19 nt, artificial
  RNA for silencing
aacaagugcaucaaaugca

SEQ ID NO: 2442 - RNA, 19 nt, artificial
  RNA for silencing
acaagugcaucaaaugcaa

SEQ ID NO: 2443 - RNA, 19 nt, artificial
  RNA for silencing
caagugcaucaaaugcaaa

SEQ ID NO: 2444 - RNA, 19 nt, artificial
  RNA for silencing
aagugcaucaaaugcaaaa

SEQ ID NO: 2445 - RNA, 19 nt, artificial
  RNA for silencing
agugcaucaaaugcaaaau

SEQ ID NO: 2446 - RNA, 19 nt, artificial
  RNA for silencing
gugcaucaaaugcaaaauc

SEQ ID NO: 2447 - RNA, 19 nt, artificial
  RNA for silencing
ugcaucaaaugcaaaaucg

SEQ ID NO: 2448 - RNA, 19 nt, artificial
  RNA for silencing
gcaucaaaugcaaaaucga

SEQ ID NO: 2449 - RNA, 19 nt, artificial
  RNA for silencing
caucaaaugcaaaaucgag

SEQ ID NO: 2450 - RNA, 19 nt, artificial
  RNA for silencing
aucaaaugcaaaaucgaga

SEQ ID NO: 2451 - RNA, 19 nt, artificial
  RNA for silencing
ucaaaugcaaaaucgagaa

SEQ ID NO: 2452 - RNA, 19 nt, artificial
  RNA for silencing
caaaugcaaaaucgagaac

SEQ ID NO: 2453 - RNA, 19 nt, artificial
  RNA for silencing
aaaugcaaaaucgagaacu

SEQ ID NO: 2454 - RNA, 19 nt, artificial
  RNA for silencing
aaugcaaaaucgagaacug

SEQ ID NO: 2455 - RNA, 19 nt, artificial
  RNA for silencing
augcaaaaucgagaacugu

SEQ ID NO: 2456 - RNA, 19 nt, artificial
  RNA for silencing
ugcaaaaucgagaacugug

SEQ ID NO: 2457 - RNA, 19 nt, artificial
  RNA for silencing
gcaaaaucgagaacuguga

SEQ ID NO: 2458 - RNA, 19 nt, artificial
  RNA for silencing
caaaaucgagaacugugag

SEQ ID NO: 2459 - RNA, 19 nt, artificial
  RNA for silencing
aaaaucgagaacugugagu

SEQ ID NO: 2460 - RNA, 19 nt, artificial
  RNA for silencing
aaaucgagaacugugaguc

SEQ ID NO: 2461 - RNA, 19 nt, artificial
  RNA for silencing
aaucgagaacugugagucc

SEQ ID NO: 2462 - RNA, 19 nt, artificial
  RNA for silencing
aucgagaacugugaguccu

SEQ ID NO: 2463 - RNA, 19 nt, artificial
  RNA for silencing
ucgagaacugugaguccug

SEQ ID NO: 2464 - RNA, 19 nt, artificial
  RNA for silencing
cgagaacugugaguccugc

SEQ ID NO: 2465 - RNA, 19 nt, artificial
  RNA for silencing
gagaacugugaguccugcu

SEQ ID NO: 2466 - RNA, 19 nt, artificial
  RNA for silencing
agaacugugaguccugcuu

SEQ ID NO: 2467 - RNA, 19 nt, artificial
  RNA for silencing
gaacugugaguccugcuuc

SEQ ID NO: 2468 - RNA, 19 nt, artificial
  RNA for silencing
aacugugaguccugcuuca

SEQ ID NO: 2469 - RNA, 19 nt, artificial
  RNA for silencing
acugugaguccugcuucag

SEQ ID NO: 2470 - RNA, 19 nt, artificial
  RNA for silencing
cugugaguccugcuucagc

SEQ ID NO: 2471 - RNA, 19 nt, artificial
  RNA for silencing
ugugaguccugcuucagcc

SEQ ID NO: 2472 - RNA, 19 nt, artificial
  RNA for silencing
gugaguccugcuucagccg

SEQ ID NO: 2473 - RNA, 19 nt, artificial
  RNA for silencing
ugaguccugcuucagccga

SEQ ID NO: 2474 - RNA, 19 nt, artificial
  RNA for silencing
gaguccugcuucagccgaa

SEQ ID NO: 2475 - RNA, 19 nt, artificial
  RNA for silencing
aguccugcuucagccgaaa

SEQ ID NO: 2476 - RNA, 19 nt, artificial
  RNA for silencing
guccugcuucagccgaaac

SEQ ID NO: 2477 - RNA, 19 nt, artificial
  RNA for silencing
uccugcuucagccgaaacu

SEQ ID NO: 2478 - RNA, 19 nt, artificial
  RNA for silencing
ccugcuucagccgaaacuu

SEQ ID NO: 2479 - RNA, 19 nt, artificial
  RNA for silencing
cugcuucagccgaaacuuu

SEQ ID NO: 2480 - RNA, 19 nt, artificial
  RNA for silencing
ugcuucagccgaaacuuuu

SEQ ID NO: 2481 - RNA, 19 nt, artificial
  RNA for silencing
gcuucagccgaaacuuuug

SEQ ID NO: 2482 - RNA, 19 nt, artificial
  RNA for silencing
cuucagccgaaacuuuugc

SEQ ID NO: 2483 - RNA, 19 nt, artificial
  RNA for silencing
uucagccgaaacuuuugca

SEQ ID NO: 2484 - RNA, 19 nt, artificial
  RNA for silencing
ucagccgaaacuuuugcac

SEQ ID NO: 2485 - RNA, 19 nt, artificial
  RNA for silencing
cagccgaaacuuuugcaca

SEQ ID NO: 2486 - RNA, 19 nt, artificial
  RNA for silencing
agccgaaacuuuugcacaa

SEQ ID NO: 2487 - RNA, 19 nt, artificial
  RNA for silencing
gccgaaacuuuugcacaaa

SEQ ID NO: 2488 - RNA, 19 nt, artificial
  RNA for silencing
ccgaaacuuuugcacaaaa

SEQ ID NO: 2489 - RNA, 19 nt, artificial
  RNA for silencing
cgaaacuuuugcacaaaau

SEQ ID NO: 2490 - RNA, 19 nt, artificial
  RNA for silencing
gaaacuuuugcacaaaaug

SEQ ID NO: 2491 - RNA, 19 nt, artificial
  RNA for silencing
aaacuuuugcacaaaaugu

SEQ ID NO: 2492 - RNA, 19 nt, artificial
  RNA for silencing
aacuuuugcacaaaaugua

SEQ ID NO: 2493 - RNA, 19 nt, artificial
  RNA for silencing
acuuuugcacaaaauguaa

SEQ ID NO: 2494 - RNA, 19 nt, artificial
  RNA for silencing
cuuuugcacaaaauguaag

SEQ ID NO: 2495 - RNA, 19 nt, artificial
  RNA for silencing
uuuugcacaaaauguaagg

SEQ ID NO: 2496 - RNA, 19 nt, artificial
  RNA for silencing
uuugcacaaaauguaagga

SEQ ID NO: 2497 - RNA, 19 nt, artificial
  RNA for silencing
uugcacaaaauguaaggaa

SEQ ID NO: 2498 - RNA, 19 nt, artificial
  RNA for silencing
ugcacaaaauguaaggaag

SEQ ID NO: 2499 - RNA, 19 nt, artificial
  RNA for silencing
gcacaaaauguaaggaagg

SEQ ID NO: 2500 - RNA, 19 nt, artificial
  RNA for silencing
cacaaaauguaaggaaggu

SEQ ID NO: 2501 - RNA, 19 nt, artificial
  RNA for silencing
acaaaauguaaggaagguu

SEQ ID NO: 2502 - RNA, 19 nt, artificial
  RNA for silencing
caaaauguaaggaagguuu

SEQ ID NO: 2503 - RNA, 19 nt, artificial
  RNA for silencing
aaaauguaaggaagguuug

SEQ ID NO: 2504 - RNA, 19 nt, artificial
  RNA for silencing
aaauguaaggaagguuugu

SEQ ID NO: 2505 - RNA, 19 nt, artificial
  RNA for silencing
aauguaaggaagguuugua

SEQ ID NO: 2506 - RNA, 19 nt, artificial
  RNA for silencing
auguaaggaagguuuguau

SEQ ID NO: 2507 - RNA, 19 nt, artificial
  RNA for silencing
uguaaggaagguuuguauu

SEQ ID NO: 2508 - RNA, 19 nt, artificial
  RNA for silencing
guaaggaagguuuguauuu

SEQ ID NO: 2509 - RNA, 19 nt, artificial
  RNA for silencing
uaaggaagguuuguauuug

SEQ ID NO: 2510 - RNA, 19 nt, artificial
  RNA for silencing
aaggaagguuuguauuugc

SEQ ID NO: 2511 - RNA, 19 nt, artificial
  RNA for silencing
aggaagguuuguauuugca

SEQ ID NO: 2512 - RNA, 19 nt, artificial
  RNA for silencing
ggaagguuuguauuugcac

SEQ ID NO: 2513 - RNA, 19 nt, artificial
  RNA for silencing
gaagguuuguauuugcaca

SEQ ID NO: 2514 - RNA, 19 nt, artificial
  RNA for silencing
aagguuuguauuugcacaa

SEQ ID NO: 2515 - RNA, 19 nt, artificial
  RNA for silencing
agguuuguauuugcacaaa

SEQ ID NO: 2516 - RNA, 19 nt, artificial
  RNA for silencing
gguuuguauuugcacaaag

SEQ ID NO: 2517 - RNA, 19 nt, artificial
  RNA for silencing
guuuguauuugcacaaagg

SEQ ID NO: 2518 - RNA, 19 nt, artificial
  RNA for silencing
uuuguauuugcacaaaggg

SEQ ID NO: 2519 - RNA, 19 nt, artificial
  RNA for silencing
uuguauuugcacaaaggga

SEQ ID NO: 2520 - RNA, 19 nt, artificial
  RNA for silencing
uguauuugcacaaagggag

SEQ ID NO: 2521 - RNA, 19 nt, artificial
  RNA for silencing
guauuugcacaaagggaga

SEQ ID NO: 2522 - RNA, 19 nt, artificial
  RNA for silencing
uauuugcacaaagggagau

SEQ ID NO: 2523 - RNA, 19 nt, artificial
  RNA for silencing
auuugcacaaagggagaug

SEQ ID NO: 2524 - RNA, 19 nt, artificial
  RNA for silencing
uuugcacaaagggagaugu

SEQ ID NO: 2525 - RNA, 19 nt, artificial
  RNA for silencing
uugcacaaagggagauguu

SEQ ID NO: 2526 - RNA, 19 nt, artificial
  RNA for silencing
ugcacaaagggagauguua

SEQ ID NO: 2527 - RNA, 19 nt, artificial
  RNA for silencing
gcacaaagggagauguuac

SEQ ID NO: 2528 - RNA, 19 nt, artificial
  RNA for silencing
cacaaagggagauguuacg

SEQ ID NO: 2529 - RNA, 19 nt, artificial
  RNA for silencing
acaaagggagauguuacgu

SEQ ID NO: 2530 - RNA, 19 nt, artificial
  RNA for silencing
caaagggagauguuacguc

SEQ ID NO: 2531 - RNA, 19 nt, artificial
  RNA for silencing
aaagggagauguuacguca

SEQ ID NO: 2532 - RNA, 19 nt, artificial
  RNA for silencing
aagggagauguuacgucac

SEQ ID NO: 2533 - RNA, 19 nt, artificial
  RNA for silencing
agggagauguuacgucacg

SEQ ID NO: 2534 - RNA, 19 nt, artificial
  RNA for silencing
gggagauguuacgucacgu

SEQ ID NO: 2535 - RNA, 19 nt, artificial
  RNA for silencing
ggagauguuacgucacgug

SEQ ID NO: 2536 - RNA, 19 nt, artificial
  RNA for silencing
gagauguuacgucacgugc

SEQ ID NO: 2537 - RNA, 19 nt, artificial
  RNA for silencing
agauguuacgucacgugcc

SEQ ID NO: 2538 - RNA, 19 nt, artificial
  RNA for silencing
gauguuacgucacgugccc

SEQ ID NO: 2539 - RNA, 19 nt, artificial
  RNA for silencing
auguuacgucacgugcccc

SEQ ID NO: 2540 - RNA, 19 nt, artificial
  RNA for silencing
uguuacgucacgugccccg

SEQ ID NO: 2541 - RNA, 19 nt, artificial
  RNA for silencing
guuacgucacgugccccga

SEQ ID NO: 2542 - RNA, 19 nt, artificial
  RNA for silencing
uuacgucacgugccccgaa

SEQ ID NO: 2543 - RNA, 19 nt, artificial
  RNA for silencing
uacgucacgugccccgaag

SEQ ID NO: 2544 - RNA, 19 nt, artificial
  RNA for silencing
acgucacgugccccgaagg

SEQ ID NO: 2545 - RNA, 19 nt, artificial
  RNA for silencing
cgucacgugccccgaaggc

SEQ ID NO: 2546 - RNA, 19 nt, artificial
  RNA for silencing
gucacgugccccgaaggcu

SEQ ID NO: 2547 - RNA, 19 nt, artificial
  RNA for silencing
ucacgugccccgaaggcua

SEQ ID NO: 2548 - RNA, 19 nt, artificial
  RNA for silencing
cacgugccccgaaggcuac

SEQ ID NO: 2549 - RNA, 19 nt, artificial
  RNA for silencing
acgugccccgaaggcuacu

SEQ ID NO: 2550 - RNA, 19 nt, artificial
  RNA for silencing
cgugccccgaaggcuacuc

SEQ ID NO: 2551 - RNA, 19 nt, artificial
  RNA for silencing
gugccccgaaggcuacucu

SEQ ID NO: 2552 - RNA, 19 nt, artificial
  RNA for silencing
ugccccgaaggcuacucug

SEQ ID NO: 2553 - RNA, 19 nt, artificial
  RNA for silencing
gccccgaaggcuacucugc

SEQ ID NO: 2554 - RNA, 19 nt, artificial
  RNA for silencing
ccccgaaggcuacucugcu

SEQ ID NO: 2555 - RNA, 19 nt, artificial
  RNA for silencing
cccgaaggcuacucugcug

SEQ ID NO: 2556 - RNA, 19 nt, artificial
  RNA for silencing
ccgaaggcuacucugcugc

SEQ ID NO: 2557 - RNA, 19 nt, artificial
  RNA for silencing
cgaaggcuacucugcugcc

SEQ ID NO: 2558 - RNA, 19 nt, artificial
  RNA for silencing
gaaggcuacucugcugcca

SEQ ID NO: 2559 - RNA, 19 nt, artificial
  RNA for silencing
aaggcuacucugcugccaa

SEQ ID NO: 2560 - RNA, 19 nt, artificial
  RNA for silencing
aggcuacucugcugccaau

SEQ ID NO: 2561 - RNA, 19 nt, artificial
  RNA for silencing
ggcuacucugcugccaaug

SEQ ID NO: 2562 - RNA, 19 nt, artificial
  RNA for silencing
gcuacucugcugccaaugg

SEQ ID NO: 2563 - RNA, 19 nt, artificial
  RNA for silencing
cuacucugcugccaauggc

SEQ ID NO: 2564 - RNA, 19 nt, artificial
  RNA for silencing
uacucugcugccaauggca

SEQ ID NO: 2565 - RNA, 19 nt, artificial
  RNA for silencing
acucugcugccaauggcac

SEQ ID NO: 2566 - RNA, 19 nt, artificial
  RNA for silencing
cucugcugccaauggcacc

SEQ ID NO: 2567 - RNA, 19 nt, artificial
  RNA for silencing
ucugcugccaauggcacca

SEQ ID NO: 2568 - RNA, 19 nt, artificial
  RNA for silencing
cugcugccaauggcaccau

SEQ ID NO: 2569 - RNA, 19 nt, artificial
  RNA for silencing
ugcugccaauggcaccaug

SEQ ID NO: 2570 - RNA, 19 nt, artificial
  RNA for silencing
gcugccaauggcaccaugg

SEQ ID NO: 2571 - RNA, 19 nt, artificial
  RNA for silencing
cugccaauggcaccaugga

SEQ ID NO: 2572 - RNA, 19 nt, artificial
  RNA for silencing
ugccaauggcaccauggag

SEQ ID NO: 2573 - RNA, 19 nt, artificial
  RNA for silencing
gccaauggcaccauggagu

SEQ ID NO: 2574 - RNA, 19 nt, artificial
  RNA for silencing
ccaauggcaccauggagug

SEQ ID NO: 2575 - RNA, 19 nt, artificial
  RNA for silencing
caauggcaccauggagugc

SEQ ID NO: 2576 - RNA, 19 nt, artificial
  RNA for silencing
aauggcaccauggagugca

SEQ ID NO: 2577 - RNA, 19 nt, artificial
  RNA for silencing
auggcaccauggagugcag

SEQ ID NO: 2578 - RNA, 19 nt, artificial
  RNA for silencing
uggcaccauggagugcagc

SEQ ID NO: 2579 - RNA, 19 nt, artificial
  RNA for silencing
ggcaccauggagugcagca

SEQ ID NO: 2580 - RNA, 19 nt, artificial
  RNA for silencing
gcaccauggagugcagcag

SEQ ID NO: 2581 - RNA, 19 nt, artificial
  RNA for silencing
caccauggagugcagcagu

SEQ ID NO: 2582 - RNA, 19 nt, artificial
  RNA for silencing
accauggagugcagcaguc

SEQ ID NO: 2583 - RNA, 19 nt, artificial
  RNA for silencing
ccauggagugcagcagucc

SEQ ID NO: 2584 - RNA, 19 nt, artificial
  RNA for silencing
cauggagugcagcaguccu

SEQ ID NO: 2585 - RNA, 19 nt, artificial
  RNA for silencing
auggagugcagcaguccug

SEQ ID NO: 2586 - RNA, 19 nt, artificial
  RNA for silencing
uggagugcagcaguccugc

SEQ ID NO: 2587 - RNA, 19 nt, artificial
  RNA for silencing
ggagugcagcaguccugcg

SEQ ID NO: 2588 - RNA, 19 nt, artificial
  RNA for silencing
gagugcagcaguccugcgc

SEQ ID NO: 2589 - RNA, 19 nt, artificial
  RNA for silencing
agugcagcaguccugcgca

SEQ ID NO: 2590 - RNA, 19 nt, artificial
  RNA for silencing
gugcagcaguccugcgcaa

SEQ ID NO: 2591 - RNA, 19 nt, artificial
  RNA for silencing
ugcagcaguccugcgcaau

SEQ ID NO: 2592 - RNA, 19 nt, artificial
  RNA for silencing
gcagcaguccugcgcaaug

SEQ ID NO: 2593 - RNA, 19 nt, artificial
  RNA for silencing
cagcaguccugcgcaaugu

SEQ ID NO: 2594 - RNA, 19 nt, artificial
  RNA for silencing
agcaguccugcgcaaugug

SEQ ID NO: 2595 - RNA, 19 nt, artificial
  RNA for silencing
gcaguccugcgcaauguga

SEQ ID NO: 2596 - RNA, 19 nt, artificial
  RNA for silencing
caguccugcgcaaugugaa

SEQ ID NO: 2597 - RNA, 19 nt, artificial
  RNA for silencing
aguccugcgcaaugugaaa

SEQ ID NO: 2598 - RNA, 19 nt, artificial
  RNA for silencing
guccugcgcaaugugaaau

SEQ ID NO: 2599 - RNA, 19 nt, artificial
  RNA for silencing
uccugcgcaaugugaaaug

SEQ ID NO: 2600 - RNA, 19 nt, artificial
  RNA for silencing
ccugcgcaaugugaaauga

SEQ ID NO: 2601 - RNA, 19 nt, artificial
  RNA for silencing
cugcgcaaugugaaaugag

SEQ ID NO: 2602 - RNA, 19 nt, artificial
  RNA for silencing
ugcgcaaugugaaaugagu

SEQ ID NO: 2603 - RNA, 19 nt, artificial
  RNA for silencing
gcgcaaugugaaaugagug

SEQ ID NO: 2604 - RNA, 19 nt, artificial
  RNA for silencing
cgcaaugugaaaugaguga

SEQ ID NO: 2605 - RNA, 19 nt, artificial
  RNA for silencing
gcaaugugaaaugagugag

SEQ ID NO: 2606 - RNA, 19 nt, artificial
  RNA for silencing
caaugugaaaugagugagu

SEQ ID NO: 2607 - RNA, 19 nt, artificial
  RNA for silencing
aaugugaaaugagugagug

SEQ ID NO: 2608 - RNA, 19 nt, artificial
  RNA for silencing
augugaaaugagugagugg

SEQ ID NO: 2609 - RNA, 19 nt, artificial
  RNA for silencing
ugugaaaugagugaguggg

SEQ ID NO: 2610 - RNA, 19 nt, artificial
  RNA for silencing
gugaaaugagugagugggg

SEQ ID NO: 2611 - RNA, 19 nt, artificial
  RNA for silencing
ugaaaugagugaguggggg

SEQ ID NO: 2612 - RNA, 19 nt, artificial
  RNA for silencing
gaaaugagugagugggggc

SEQ ID NO: 2613 - RNA, 19 nt, artificial
  RNA for silencing
aaaugagugagugggggcc

SEQ ID NO: 2614 - RNA, 19 nt, artificial
  RNA for silencing
aaugagugagugggggccc

SEQ ID NO: 2615 - RNA, 19 nt, artificial
  RNA for silencing
augagugagugggggcccu

SEQ ID NO: 2616 - RNA, 19 nt, artificial
  RNA for silencing
ugagugagugggggcccug

SEQ ID NO: 2617 - RNA, 19 nt, artificial
  RNA for silencing
gagugagugggggcccugg

SEQ ID NO: 2618 - RNA, 19 nt, artificial
  RNA for silencing
agugagugggggcccuggg

SEQ ID NO: 2619 - RNA, 19 nt, artificial
  RNA for silencing
gugagugggggcccugggg

SEQ ID NO: 2620 - RNA, 19 nt, artificial
  RNA for silencing
ugagugggggcccuggggg

SEQ ID NO: 2621 - RNA, 19 nt, artificial
  RNA for silencing
gagugggggcccugggggc

SEQ ID NO: 2622 - RNA, 19 nt, artificial
  RNA for silencing
agugggggcccugggggcc

SEQ ID NO: 2623 - RNA, 19 nt, artificial
  RNA for silencing
gugggggcccugggggccc

SEQ ID NO: 2624 - RNA, 19 nt, artificial
  RNA for silencing
ugggggcccugggggcccu

SEQ ID NO: 2625 - RNA, 19 nt, artificial
  RNA for silencing
gggggcccugggggcccug

SEQ ID NO: 2626 - RNA, 19 nt, artificial
  RNA for silencing
ggggcccugggggcccugc

SEQ ID NO: 2627 - RNA, 19 nt, artificial
  RNA for silencing
gggcccugggggcccugcu

SEQ ID NO: 2628 - RNA, 19 nt, artificial
  RNA for silencing
ggcccugggggcccugcuc

SEQ ID NO: 2629 - RNA, 19 nt, artificial
  RNA for silencing
gcccugggggcccugcucc

SEQ ID NO: 2630 - RNA, 19 nt, artificial
  RNA for silencing
cccugggggcccugcucca

SEQ ID NO: 2631 - RNA, 19 nt, artificial
  RNA for silencing
ccugggggcccugcuccaa

SEQ ID NO: 2632 - RNA, 19 nt, artificial
  RNA for silencing
cugggggcccugcuccaag

SEQ ID NO: 2633 - RNA, 19 nt, artificial
  RNA for silencing
ugggggcccugcuccaaga

SEQ ID NO: 2634 - RNA, 19 nt, artificial
  RNA for silencing
gggggcccugcuccaagaa

SEQ ID NO: 2635 - RNA, 19 nt, artificial
  RNA for silencing
ggggcccugcuccaagaag

SEQ ID NO: 2636 - RNA, 19 nt, artificial
  RNA for silencing
gggcccugcuccaagaaga

SEQ ID NO: 2637 - RNA, 19 nt, artificial
  RNA for silencing
ggcccugcuccaagaagag

SEQ ID NO: 2638 - RNA, 19 nt, artificial
  RNA for silencing
gcccugcuccaagaagagg

SEQ ID NO: 2639 - RNA, 19 nt, artificial
  RNA for silencing
cccugcuccaagaagagga

SEQ ID NO: 2640 - RNA, 19 nt, artificial
  RNA for silencing
ccugcuccaagaagaggaa

SEQ ID NO: 2641 - RNA, 19 nt, artificial
  RNA for silencing
cugcuccaagaagaggaag

SEQ ID NO: 2642 - RNA, 19 nt, artificial
  RNA for silencing
ugcuccaagaagaggaagc

SEQ ID NO: 2643 - RNA, 19 nt, artificial
  RNA for silencing
gcuccaagaagaggaagcu

SEQ ID NO: 2644 - RNA, 19 nt, artificial
  RNA for silencing
cuccaagaagaggaagcug

SEQ ID NO: 2645 - RNA, 19 nt, artificial
  RNA for silencing
uccaagaagaggaagcugu

SEQ ID NO: 2646 - RNA, 19 nt, artificial
  RNA for silencing
ccaagaagaggaagcugug

SEQ ID NO: 2647 - RNA, 19 nt, artificial
  RNA for silencing
caagaagaggaagcugugu

SEQ ID NO: 2648 - RNA, 19 nt, artificial
  RNA for silencing
aagaagaggaagcugugug

SEQ ID NO: 2649 - RNA, 19 nt, artificial
  RNA for silencing
agaagaggaagcugugugg

SEQ ID NO: 2650 - RNA, 19 nt, artificial
  RNA for silencing
gaagaggaagcuguguggc

SEQ ID NO: 2651 - RNA, 19 nt, artificial
  RNA for silencing
aagaggaagcuguguggcu

SEQ ID NO: 2652 - RNA, 19 nt, artificial
  RNA for silencing
agaggaagcuguguggcuu

SEQ ID NO: 2653 - RNA, 19 nt, artificial
  RNA for silencing
gaggaagcuguguggcuuc

SEQ ID NO: 2654 - RNA, 19 nt, artificial
  RNA for silencing
aggaagcuguguggcuuca

SEQ ID NO: 2655 - RNA, 19 nt, artificial
  RNA for silencing
ggaagcuguguggcuucaa

SEQ ID NO: 2656 - RNA, 19 nt, artificial
  RNA for silencing
gaagcuguguggcuucaag

SEQ ID NO: 2657 - RNA, 19 nt, artificial
  RNA for silencing
aagcuguguggcuucaaga

SEQ ID NO: 2658 - RNA, 19 nt, artificial
  RNA for silencing
agcuguguggcuucaagaa

SEQ ID NO: 2659 - RNA, 19 nt, artificial
  RNA for silencing
gcuguguggcuucaagaag

SEQ ID NO: 2660 - RNA, 19 nt, artificial
  RNA for silencing
cuguguggcuucaagaagg

SEQ ID NO: 2661 - RNA, 19 nt, artificial
  RNA for silencing
uguguggcuucaagaaggg

SEQ ID NO: 2662 - RNA, 19 nt, artificial
  RNA for silencing
guguggcuucaagaagggg

SEQ ID NO: 2663 - RNA, 19 nt, artificial
  RNA for silencing
uguggcuucaagaagggga

SEQ ID NO: 2664 - RNA, 19 nt, artificial
  RNA for silencing
guggcuucaagaaggggaa

SEQ ID NO: 2665 - RNA, 19 nt, artificial
  RNA for silencing
uggcuucaagaaggggaac

SEQ ID NO: 2666 - RNA, 19 nt, artificial
  RNA for silencing
ggcuucaagaaggggaacg

SEQ ID NO: 2667 - RNA, 19 nt, artificial
  RNA for silencing
gcuucaagaaggggaacga

SEQ ID NO: 2668 - RNA, 19 nt, artificial
  RNA for silencing
cuucaagaaggggaacgag

SEQ ID NO: 2669 - RNA, 19 nt, artificial
  RNA for silencing
uucaagaaggggaacgagg

SEQ ID NO: 2670 - RNA, 19 nt, artificial
  RNA for silencing
ucaagaaggggaacgagga

SEQ ID NO: 2671 - RNA, 19 nt, artificial
  RNA for silencing
caagaaggggaacgaggac

SEQ ID NO: 2672 - RNA, 19 nt, artificial
  RNA for silencing
aagaaggggaacgaggacc

SEQ ID NO: 2673 - RNA, 19 nt, artificial
  RNA for silencing
agaaggggaacgaggaccg

SEQ ID NO: 2674 - RNA, 19 nt, artificial
  RNA for silencing
gaaggggaacgaggaccga

SEQ ID NO: 2675 - RNA, 19 nt, artificial
  RNA for silencing
aaggggaacgaggaccgaa

SEQ ID NO: 2676 - RNA, 19 nt, artificial
  RNA for silencing
aggggaacgaggaccgaac

SEQ ID NO: 2677 - RNA, 19 nt, artificial
  RNA for silencing
ggggaacgaggaccgaacg

SEQ ID NO: 2678 - RNA, 19 nt, artificial
  RNA for silencing
gggaacgaggaccgaacgc

SEQ ID NO: 2679 - RNA, 19 nt, artificial
  RNA for silencing
ggaacgaggaccgaacgcg

SEQ ID NO: 2680 - RNA, 19 nt, artificial
  RNA for silencing
gaacgaggaccgaacgcgg

SEQ ID NO: 2681 - RNA, 19 nt, artificial
  RNA for silencing
aacgaggaccgaacgcggc

SEQ ID NO: 2682 - RNA, 19 nt, artificial
  RNA for silencing
acgaggaccgaacgcggcg

SEQ ID NO: 2683 - RNA, 19 nt, artificial
  RNA for silencing
cgaggaccgaacgcggcgg

SEQ ID NO: 2684 - RNA, 19 nt, artificial
  RNA for silencing
gaggaccgaacgcggcgga

SEQ ID NO: 2685 - RNA, 19 nt, artificial
  RNA for silencing
aggaccgaacgcggcggau

SEQ ID NO: 2686 - RNA, 19 nt, artificial
  RNA for silencing
ggaccgaacgcggcggauc

SEQ ID NO: 2687 - RNA, 19 nt, artificial
  RNA for silencing
gaccgaacgcggcggaucc

SEQ ID NO: 2688 - RNA, 19 nt, artificial
  RNA for silencing
accgaacgcggcggauccu

SEQ ID NO: 2689 - RNA, 19 nt, artificial
  RNA for silencing
ccgaacgcggcggauccug

SEQ ID NO: 2690 - RNA, 19 nt, artificial
  RNA for silencing
cgaacgcggcggauccugc

SEQ ID NO: 2691 - RNA, 19 nt, artificial
  RNA for silencing
gaacgcggcggauccugca

SEQ ID NO: 2692 - RNA, 19 nt, artificial
  RNA for silencing
aacgcggcggauccugcag

SEQ ID NO: 2693 - RNA, 19 nt, artificial
  RNA for silencing
acgcggcggauccugcagg

SEQ ID NO: 2694 - RNA, 19 nt, artificial
  RNA for silencing
cgcggcggauccugcaggc

SEQ ID NO: 2695 - RNA, 19 nt, artificial
  RNA for silencing
gcggcggauccugcaggcu

SEQ ID NO: 2696 - RNA, 19 nt, artificial
  RNA for silencing
cggcggauccugcaggcuc

SEQ ID NO: 2697 - RNA, 19 nt, artificial
  RNA for silencing
ggcggauccugcaggcucc

SEQ ID NO: 2698 - RNA, 19 nt, artificial
  RNA for silencing
gcggauccugcaggcuccc

SEQ ID NO: 2699 - RNA, 19 nt, artificial
  RNA for silencing
cggauccugcaggcucccu

SEQ ID NO: 2700 - RNA, 19 nt, artificial
  RNA for silencing
ggauccugcaggcucccuc

SEQ ID NO: 2701 - RNA, 19 nt, artificial
  RNA for silencing
gauccugcaggcucccucu

SEQ ID NO: 2702 - RNA, 19 nt, artificial
  RNA for silencing
auccugcaggcucccucug

SEQ ID NO: 2703 - RNA, 19 nt, artificial
  RNA for silencing
uccugcaggcucccucugg

SEQ ID NO: 2704 - RNA, 19 nt, artificial
  RNA for silencing
ccugcaggcucccucuggg

SEQ ID NO: 2705 - RNA, 19 nt, artificial
  RNA for silencing
cugcaggcucccucugggg

SEQ ID NO: 2706 - RNA, 19 nt, artificial
  RNA for silencing
ugcaggcucccucugggga

SEQ ID NO: 2707 - RNA, 19 nt, artificial
  RNA for silencing
gcaggcucccucuggggac

SEQ ID NO: 2708 - RNA, 19 nt, artificial
  RNA for silencing
caggcucccucuggggacg

SEQ ID NO: 2709 - RNA, 19 nt, artificial
  RNA for silencing
aggcucccucuggggacgu

SEQ ID NO: 2710 - RNA, 19 nt, artificial
  RNA for silencing
ggcucccucuggggacgug

SEQ ID NO: 2711 - RNA, 19 nt, artificial
  RNA for silencing
gcucccucuggggacgugu

SEQ ID NO: 2712 - RNA, 19 nt, artificial
  RNA for silencing
cucccucuggggacguguc

SEQ ID NO: 2713 - RNA, 19 nt, artificial
  RNA for silencing
ucccucuggggacgugucc

SEQ ID NO: 2714 - RNA, 19 nt, artificial
  RNA for silencing
cccucuggggacguguccc

SEQ ID NO: 2715 - RNA, 19 nt, artificial
  RNA for silencing
ccucuggggacgugucccu

SEQ ID NO: 2716 - RNA, 19 nt, artificial
  RNA for silencing
cucuggggacgugucccug

SEQ ID NO: 2717 - RNA, 19 nt, artificial
  RNA for silencing
ucuggggacgugucccugu

SEQ ID NO: 2718 - RNA, 19 nt, artificial
  RNA for silencing
cuggggacgugucccugug

SEQ ID NO: 2719 - RNA, 19 nt, artificial
  RNA for silencing
uggggacgugucccugugc

SEQ ID NO: 2720 - RNA, 19 nt, artificial
  RNA for silencing
ggggacgugucccugugcc

SEQ ID NO: 2721 - RNA, 19 nt, artificial
  RNA for silencing
gggacgugucccugugccc

SEQ ID NO: 2722 - RNA, 19 nt, artificial
  RNA for silencing
ggacgugucccugugcccc

SEQ ID NO: 2723 - RNA, 19 nt, artificial
  RNA for silencing
gacgugucccugugccccg

SEQ ID NO: 2724 - RNA, 19 nt, artificial
  RNA for silencing
acgugucccugugccccgc

SEQ ID NO: 2725 - RNA, 19 nt, artificial
  RNA for silencing
cgugucccugugccccgcc

SEQ ID NO: 2726 - RNA, 19 nt, artificial
  RNA for silencing
gugucccugugccccgcca

SEQ ID NO: 2727 - RNA, 19 nt, artificial
  RNA for silencing
ugucccugugccccgccac

SEQ ID NO: 2728 - RNA, 19 nt, artificial
  RNA for silencing
gucccugugccccgccacc

SEQ ID NO: 2729 - RNA, 19 nt, artificial
  RNA for silencing
ucccugugccccgccacca

SEQ ID NO: 2730 - RNA, 19 nt, artificial
  RNA for silencing
cccugugccccgccaccac

SEQ ID NO: 2731 - RNA, 19 nt, artificial
  RNA for silencing
ccugugccccgccaccacg

SEQ ID NO: 2732 - RNA, 19 nt, artificial
  RNA for silencing
cugugccccgccaccacgg

SEQ ID NO: 2733 - RNA, 19 nt, artificial
  RNA for silencing
ugugccccgccaccacgga

SEQ ID NO: 2734 - RNA, 19 nt, artificial
  RNA for silencing
gugccccgccaccacggag

SEQ ID NO: 2735 - RNA, 19 nt, artificial
  RNA for silencing
ugccccgccaccacggagg

SEQ ID NO: 2736 - RNA, 19 nt, artificial
  RNA for silencing
gccccgccaccacggaggu

SEQ ID NO: 2737 - RNA, 19 nt, artificial
  RNA for silencing
ccccgccaccacggaggug

SEQ ID NO: 2738 - RNA, 19 nt, artificial
  RNA for silencing
cccgccaccacggaggugc

SEQ ID NO: 2739 - RNA, 19 nt, artificial
  RNA for silencing
ccgccaccacggaggugcg

SEQ ID NO: 2740 - RNA, 19 nt, artificial
  RNA for silencing
cgccaccacggaggugcgc

SEQ ID NO: 2741 - RNA, 19 nt, artificial
  RNA for silencing
gccaccacggaggugcgca

SEQ ID NO: 2742 - RNA, 19 nt, artificial
  RNA for silencing
ccaccacggaggugcgcag

SEQ ID NO: 2743 - RNA, 19 nt, artificial
  RNA for silencing
caccacggaggugcgcaga

SEQ ID NO: 2744 - RNA, 19 nt, artificial
  RNA for silencing
accacggaggugcgcagau

SEQ ID NO: 2745 - RNA, 19 nt, artificial
  RNA for silencing
ccacggaggugcgcagaug

SEQ ID NO: 2746 - RNA, 19 nt, artificial
  RNA for silencing
cacggaggugcgcagaugc

SEQ ID NO: 2747 - RNA, 19 nt, artificial
  RNA for silencing
acggaggugcgcagaugca

SEQ ID NO: 2748 - RNA, 19 nt, artificial
  RNA for silencing
cggaggugcgcagaugcac

SEQ ID NO: 2749 - RNA, 19 nt, artificial
  RNA for silencing
ggaggugcgcagaugcacu

SEQ ID NO: 2750 - RNA, 19 nt, artificial
  RNA for silencing
gaggugcgcagaugcacug

SEQ ID NO: 2751 - RNA, 19 nt, artificial
  RNA for silencing
aggugcgcagaugcacugu

SEQ ID NO: 2752 - RNA, 19 nt, artificial
  RNA for silencing
ggugcgcagaugcacugug

SEQ ID NO: 2753 - RNA, 19 nt, artificial
  RNA for silencing
gugcgcagaugcacugugc

SEQ ID NO: 2754 - RNA, 19 nt, artificial
  RNA for silencing
ugcgcagaugcacugugca

SEQ ID NO: 2755 - RNA, 19 nt, artificial
  RNA for silencing
gcgcagaugcacugugcag

SEQ ID NO: 2756 - RNA, 19 nt, artificial
  RNA for silencing
cgcagaugcacugugcaga

SEQ ID NO: 2757 - RNA, 19 nt, artificial
  RNA for silencing
gcagaugcacugugcagaa

SEQ ID NO: 2758 - RNA, 19 nt, artificial
  RNA for silencing
cagaugcacugugcagaag

SEQ ID NO: 2759 - RNA, 19 nt, artificial
  RNA for silencing
agaugcacugugcagaaga

SEQ ID NO: 2760 - RNA, 19 nt, artificial
  RNA for silencing
gaugcacugugcagaagag

SEQ ID NO: 2761 - RNA, 19 nt, artificial
  RNA for silencing
augcacugugcagaagagc

SEQ ID NO: 2762 - RNA, 19 nt, artificial
  RNA for silencing
ugcacugugcagaagagcc

SEQ ID NO: 2763 - RNA, 19 nt, artificial
  RNA for silencing
gcacugugcagaagagcca

SEQ ID NO: 2764 - RNA, 19 nt, artificial
  RNA for silencing
cacugugcagaagagccaa

SEQ ID NO: 2765 - RNA, 19 nt, artificial
  RNA for silencing
acugugcagaagagccaau

SEQ ID NO: 2766 - RNA, 19 nt, artificial
  RNA for silencing
cugugcagaagagccaaug

SEQ ID NO: 2767 - RNA, 19 nt, artificial
  RNA for silencing
ugugcagaagagccaaugc

SEQ ID NO: 2768 - RNA, 19 nt, artificial
  RNA for silencing
gugcagaagagccaaugcc

SEQ ID NO: 2769 - RNA, 19 nt, artificial
  RNA for silencing
ugcagaagagccaaugccc

SEQ ID NO: 2770 - RNA, 19 nt, artificial
  RNA for silencing
gcagaagagccaaugcccc

SEQ ID NO: 2771 - RNA, 19 nt, artificial
  RNA for silencing
cagaagagccaaugccccg

SEQ ID NO: 2772 - RNA, 19 nt, artificial
  RNA for silencing
agaagagccaaugccccga

SEQ ID NO: 2773 - RNA, 19 nt, artificial
  RNA for silencing
gaagagccaaugccccgaa

SEQ ID NO: 2774 - RNA, 19 nt, artificial
  RNA for silencing
aagagccaaugccccgaag

SEQ ID NO: 2775 - RNA, 19 nt, artificial
  RNA for silencing
agagccaaugccccgaagg

SEQ ID NO: 2776 - RNA, 19 nt, artificial
  RNA for silencing
gagccaaugccccgaaggg

SEQ ID NO: 2777 - RNA, 19 nt, artificial
  RNA for silencing
agccaaugccccgaaggga

SEQ ID NO: 2778 - RNA, 19 nt, artificial
  RNA for silencing
gccaaugccccgaagggaa

SEQ ID NO: 2779 - RNA, 19 nt, artificial
  RNA for silencing
ccaaugccccgaagggaaa

SEQ ID NO: 2780 - RNA, 19 nt, artificial
  RNA for silencing
caaugccccgaagggaaaa

SEQ ID NO: 2781 - RNA, 19 nt, artificial
  RNA for silencing
aaugccccgaagggaaaag

SEQ ID NO: 2782 - RNA, 19 nt, artificial
  RNA for silencing
augccccgaagggaaaagg

SEQ ID NO: 2783 - RNA, 19 nt, artificial
  RNA for silencing
ugccccgaagggaaaagga

SEQ ID NO: 2784 - RNA, 19 nt, artificial
  RNA for silencing
gccccgaagggaaaaggaa

SEQ ID NO: 2785 - RNA, 19 nt, artificial
  RNA for silencing
ccccgaagggaaaaggaag

SEQ ID NO: 2786 - RNA, 19 nt, artificial
  RNA for silencing
cccgaagggaaaaggaaga

SEQ ID NO: 2787 - RNA, 19 nt, artificial
  RNA for silencing
ccgaagggaaaaggaagaa

SEQ ID NO: 2788 - RNA, 19 nt, artificial
  RNA for silencing
cgaagggaaaaggaagaaa

SEQ ID NO: 2789 - RNA, 19 nt, artificial
  RNA for silencing
gaagggaaaaggaagaaaa

SEQ ID NO: 2790 - RNA, 19 nt, artificial
  RNA for silencing
aagggaaaaggaagaaaaa

SEQ ID NO: 2791 - RNA, 19 nt, artificial
  RNA for silencing
agggaaaaggaagaaaaag

SEQ ID NO: 2792 - RNA, 19 nt, artificial
  RNA for silencing
gggaaaaggaagaaaaagg

SEQ ID NO: 2793 - RNA, 19 nt, artificial
  RNA for silencing
ggaaaaggaagaaaaagga

SEQ ID NO: 2794 - RNA, 19 nt, artificial
  RNA for silencing
gaaaaggaagaaaaaggac

SEQ ID NO: 2795 - RNA, 19 nt, artificial
  RNA for silencing
aaaaggaagaaaaaggacg

SEQ ID NO: 2796 - RNA, 19 nt, artificial
  RNA for silencing
aaaggaagaaaaaggacga

SEQ ID NO: 2797 - RNA, 19 nt, artificial
  RNA for silencing
aaggaagaaaaaggacgag

SEQ ID NO: 2798 - RNA, 19 nt, artificial
  RNA for silencing
aggaagaaaaaggacgagc

SEQ ID NO: 2799 - RNA, 19 nt, artificial
  RNA for silencing
ggaagaaaaaggacgagca

SEQ ID NO: 2800 - RNA, 19 nt, artificial
  RNA for silencing
gaagaaaaaggacgagcaa

SEQ ID NO: 2801 - RNA, 19 nt, artificial
  RNA for silencing
aagaaaaaggacgagcaag

SEQ ID NO: 2802 - RNA, 19 nt, artificial
  RNA for silencing
agaaaaaggacgagcaagg

SEQ ID NO: 2803 - RNA, 19 nt, artificial
  RNA for silencing
gaaaaaggacgagcaagga

SEQ ID NO: 2804 - RNA, 19 nt, artificial
  RNA for silencing
aaaaaggacgagcaaggaa

SEQ ID NO: 2805 - RNA, 19 nt, artificial
  RNA for silencing
aaaaggacgagcaaggaaa

SEQ ID NO: 2806 - RNA, 19 nt, artificial
  RNA for silencing
aaaggacgagcaaggaaag

SEQ ID NO: 2807 - RNA, 19 nt, artificial
  RNA for silencing
aaggacgagcaaggaaagc

SEQ ID NO: 2808 - RNA, 19 nt, artificial
  RNA for silencing
aggacgagcaaggaaagca

SEQ ID NO: 2809 - RNA, 19 nt, artificial
  RNA for silencing
ggacgagcaaggaaagcaa

SEQ ID NO: 2810 - RNA, 19 nt, artificial
  RNA for silencing
gacgagcaaggaaagcaag

SEQ ID NO: 2811 - RNA, 19 nt, artificial
  RNA for silencing
acgagcaaggaaagcaaga

SEQ ID NO: 2812 - RNA, 19 nt, artificial
  RNA for silencing
cgagcaaggaaagcaagau

SEQ ID NO: 2813 - RNA, 19 nt, artificial
  RNA for silencing
gagcaaggaaagcaagaua

SEQ ID NO: 2814 - RNA, 19 nt, artificial
  RNA for silencing
agcaaggaaagcaagauaa

SEQ ID NO: 2815 - RNA, 19 nt, artificial
  RNA for silencing
gcaaggaaagcaagauaau

SEQ ID NO: 2816 - RNA, 19 nt, artificial
  RNA for silencing
caaggaaagcaagauaaua

SEQ ID NO: 2817 - RNA, 19 nt, artificial
  RNA for silencing
aaggaaagcaagauaauac

SEQ ID NO: 2818 - RNA, 19 nt, artificial
  RNA for silencing
aggaaagcaagauaauaca

SEQ ID NO: 2819 - RNA, 19 nt, artificial
  RNA for silencing
ggaaagcaagauaauacaa

SEQ ID NO: 2820 - RNA, 19 nt, artificial
  RNA for silencing
gaaagcaagauaauacaaa

SEQ ID NO: 2821 - RNA, 19 nt, artificial
  RNA for silencing
aaagcaagauaauacaaac

SEQ ID NO: 2822 - RNA, 19 nt, artificial
  RNA for silencing
aagcaagauaauacaaacg

SEQ ID NO: 2823 - RNA, 19 nt, artificial
  RNA for silencing
agcaagauaauacaaacgg

SEQ ID NO: 2824 - RNA, 19 nt, artificial
  RNA for silencing
gcaagauaauacaaacggg

SEQ ID NO: 2825 - RNA, 19 nt, artificial
  RNA for silencing
caagauaauacaaacggga

SEQ ID NO: 2826 - RNA, 19 nt, artificial
  RNA for silencing
aagauaauacaaacgggaa

SEQ ID NO: 2827 - RNA, 19 nt, artificial
  RNA for silencing
agauaauacaaacgggaac

SEQ ID NO: 2828 - RNA, 19 nt, artificial
  RNA for silencing
gauaauacaaacgggaaca

SEQ ID NO: 2829 - RNA, 19 nt, artificial
  RNA for silencing
auaauacaaacgggaacag

SEQ ID NO: 2830 - RNA, 19 nt, artificial
  RNA for silencing
uaauacaaacgggaacaga

SEQ ID NO: 2831 - RNA, 19 nt, artificial
  RNA for silencing
aauacaaacgggaacagaa

SEQ ID NO: 2832 - RNA, 19 nt, artificial
  RNA for silencing
auacaaacgggaacagaaa

SEQ ID NO: 2833 - RNA, 19 nt, artificial
  RNA for silencing
uacaaacgggaacagaaau

SEQ ID NO: 2834 - RNA, 19 nt, artificial
  RNA for silencing
acaaacgggaacagaaauc

SEQ ID NO: 2835 - RNA, 19 nt, artificial
  RNA for silencing
caaacgggaacagaaaucg

SEQ ID NO: 2836 - RNA, 19 nt, artificial
  RNA for silencing
aaacgggaacagaaaucgg

SEQ ID NO: 2837 - RNA, 19 nt, artificial
  RNA for silencing
aacgggaacagaaaucgga

SEQ ID NO: 2838 - RNA, 19 nt, artificial
  RNA for silencing
acgggaacagaaaucggaa

SEQ ID NO: 2839 - RNA, 19 nt, artificial
  RNA for silencing
cgggaacagaaaucggaaa

SEQ ID NO: 2840 - RNA, 19 nt, artificial
  RNA for silencing
gggaacagaaaucggaaag

SEQ ID NO: 2841 - RNA, 19 nt, artificial
  RNA for silencing
ggaacagaaaucggaaaga

SEQ ID NO: 2842 - RNA, 19 nt, artificial
  RNA for silencing
gaacagaaaucggaaagac

SEQ ID NO: 2843 - RNA, 19 nt, artificial
  RNA for silencing
aacagaaaucggaaagaca

SEQ ID NO: 2844 - RNA, 19 nt, artificial
  RNA for silencing
acagaaaucggaaagacac

SEQ ID NO: 2845 - RNA, 19 nt, artificial
  RNA for silencing
cagaaaucggaaagacacc

SEQ ID NO: 2846 - RNA, 19 nt, artificial
  RNA for silencing
agaaaucggaaagacacca

SEQ ID NO: 2847 - RNA, 19 nt, artificial
  RNA for silencing
gaaaucggaaagacaccaa

SEQ ID NO: 2848 - RNA, 19 nt, artificial
  RNA for silencing
aaaucggaaagacaccaaa

SEQ ID NO: 2849 - RNA, 19 nt, artificial
  RNA for silencing
aaucggaaagacaccaaag

SEQ ID NO: 2850 - RNA, 19 nt, artificial
  RNA for silencing
aucggaaagacaccaaaga

SEQ ID NO: 2851 - RNA, 19 nt, artificial
  RNA for silencing
ucggaaagacaccaaagau

SEQ ID NO: 2852 - RNA, 19 nt, artificial
  RNA for silencing
cggaaagacaccaaagaug

SEQ ID NO: 2853 - RNA, 19 nt, artificial
  RNA for silencing
ggaaagacaccaaagaugc

SEQ ID NO: 2854 - RNA, 19 nt, artificial
  RNA for silencing
gaaagacaccaaagaugca

SEQ ID NO: 2855 - RNA, 19 nt, artificial
  RNA for silencing
aaagacaccaaagaugcaa

SEQ ID NO: 2856 - RNA, 19 nt, artificial
  RNA for silencing
aagacaccaaagaugcaaa

SEQ ID NO: 2857 - RNA, 19 nt, artificial
  RNA for silencing
agacaccaaagaugcaaag

SEQ ID NO: 2858 - RNA, 19 nt, artificial
  RNA for silencing
gacaccaaagaugcaaagu

SEQ ID NO: 2859 - RNA, 19 nt, artificial
  RNA for silencing
acaccaaagaugcaaaguc

SEQ ID NO: 2860 - RNA, 19 nt, artificial
  RNA for silencing
caccaaagaugcaaagucu

SEQ ID NO: 2861 - RNA, 19 nt, artificial
  RNA for silencing
accaaagaugcaaagucug

SEQ ID NO: 2862 - RNA, 19 nt, artificial
  RNA for silencing
ccaaagaugcaaagucugg

SEQ ID NO: 2863 - RNA, 19 nt, artificial
  RNA for silencing
caaagaugcaaagucuggc

SEQ ID NO: 2864 - RNA, 19 nt, artificial
  RNA for silencing
aaagaugcaaagucuggca

SEQ ID NO: 2865 - RNA, 19 nt, artificial
  RNA for silencing
aagaugcaaagucuggcac

SEQ ID NO: 2866 - RNA, 19 nt, artificial
  RNA for silencing
agaugcaaagucuggcacc

SEQ ID NO: 2867 - RNA, 19 nt, artificial
  RNA for silencing
gaugcaaagucuggcacca

SEQ ID NO: 2868 - RNA, 19 nt, artificial
  RNA for silencing
augcaaagucuggcaccaa

SEQ ID NO: 2869 - RNA, 19 nt, artificial
  RNA for silencing
ugcaaagucuggcaccaag

SEQ ID NO: 2870 - RNA, 19 nt, artificial
  RNA for silencing
gcaaagucuggcaccaaga

SEQ ID NO: 2871 - RNA, 19 nt, artificial
  RNA for silencing
caaagucuggcaccaagaa

SEQ ID NO: 2872 - RNA, 19 nt, artificial
  RNA for silencing
aaagucuggcaccaagaag

SEQ ID NO: 2873 - RNA, 19 nt, artificial
  RNA for silencing
aagucuggcaccaagaaga

SEQ ID NO: 2874 - RNA, 19 nt, artificial
  RNA for silencing
agucuggcaccaagaagag

SEQ ID NO: 2875 - RNA, 19 nt, artificial
  RNA for silencing
gucuggcaccaagaagagg

SEQ ID NO: 2876 - RNA, 19 nt, artificial
  RNA for silencing
ucuggcaccaagaagagga

SEQ ID NO: 2877 - RNA, 19 nt, artificial
  RNA for silencing
cuggcaccaagaagaggaa

SEQ ID NO: 2878 - RNA, 19 nt, artificial
  RNA for silencing
uggcaccaagaagaggaag

SEQ ID NO: 2879 - RNA, 19 nt, artificial
  RNA for silencing
ggcaccaagaagaggaaga

SEQ ID NO: 2880 - RNA, 19 nt, artificial
  RNA for silencing
gcaccaagaagaggaagag

SEQ ID NO: 2881 - RNA, 19 nt, artificial
  RNA for silencing
caccaagaagaggaagagc

SEQ ID NO: 2882 - RNA, 19 nt, artificial
  RNA for silencing
accaagaagaggaagagca

SEQ ID NO: 2883 - RNA, 19 nt, artificial
  RNA for silencing
ccaagaagaggaagagcaa

SEQ ID NO: 2884 - RNA, 19 nt, artificial
  RNA for silencing
caagaagaggaagagcaaa

SEQ ID NO: 2885 - RNA, 19 nt, artificial
  RNA for silencing
aagaagaggaagagcaaac

SEQ ID NO: 2886 - RNA, 19 nt, artificial
  RNA for silencing
agaagaggaagagcaaaca

SEQ ID NO: 2887 - RNA, 19 nt, artificial
  RNA for silencing
gaagaggaagagcaaacag

SEQ ID NO: 2888 - RNA, 19 nt, artificial
  RNA for silencing
aagaggaagagcaaacaga

SEQ ID NO: 2889 - RNA, 19 nt, artificial
  RNA for silencing
agaggaagagcaaacagag

SEQ ID NO: 2890 - RNA, 19 nt, artificial
  RNA for silencing
gaggaagagcaaacagagg

SEQ ID NO: 2891 - RNA, 19 nt, artificial
  RNA for silencing
aggaagagcaaacagaggg

SEQ ID NO: 2892 - RNA, 19 nt, artificial
  RNA for silencing
ggaagagcaaacagagggg

SEQ ID NO: 2893 - RNA, 19 nt, artificial
  RNA for silencing
gaagagcaaacagaggggg

SEQ ID NO: 2894 - RNA, 19 nt, artificial
  RNA for silencing
aagagcaaacagagggggg

SEQ ID NO: 2895 - RNA, 19 nt, artificial
  RNA for silencing
agagcaaacagaggggggc

SEQ ID NO: 2896 - RNA, 19 nt, artificial
  RNA for silencing
gagcaaacagaggggggcu

SEQ ID NO: 2897 - RNA, 19 nt, artificial
  RNA for silencing
agcaaacagaggggggcug

SEQ ID NO: 2898 - RNA, 19 nt, artificial
  RNA for silencing
gcaaacagaggggggcugu

SEQ ID NO: 2899 - RNA, 19 nt, artificial
  RNA for silencing
caaacagaggggggcugug

SEQ ID NO: 2900 - RNA, 19 nt, artificial
  RNA for silencing
aaacagaggggggcugugg

SEQ ID NO: 2901 - RNA, 19 nt, artificial
  RNA for silencing
aacagaggggggcuguggc

SEQ ID NO: 2902 - RNA, 19 nt, artificial
  RNA for silencing
acagaggggggcuguggcc

SEQ ID NO: 2903 - RNA, 19 nt, artificial
  RNA for silencing
cagaggggggcuguggccc

SEQ ID NO: 2904 - RNA, 19 nt, artificial
  RNA for silencing
agaggggggcuguggcccc

SEQ ID NO: 2905 - RNA, 19 nt, artificial
  RNA for silencing
gaggggggcuguggccccc

SEQ ID NO: 2906 - RNA, 19 nt, artificial
  RNA for silencing
aggggggcuguggccccca

SEQ ID NO: 2907 - RNA, 19 nt, artificial
  RNA for silencing
ggggggcuguggcccccac

SEQ ID NO: 2908 - RNA, 19 nt, artificial
  RNA for silencing
gggggcuguggcccccacc

SEQ ID NO: 2909 - RNA, 19 nt, artificial
  RNA for silencing
ggggcuguggcccccacca

SEQ ID NO: 2910 - RNA, 19 nt, artificial
  RNA for silencing
gggcuguggcccccaccac

SEQ ID NO: 2911 - RNA, 19 nt, artificial
  RNA for silencing
ggcuguggcccccaccaca

SEQ ID NO: 2912 - RNA, 19 nt, artificial
  RNA for silencing
gcuguggcccccaccacau

SEQ ID NO: 2913 - RNA, 19 nt, artificial
  RNA for silencing
cuguggcccccaccacauc

SEQ ID NO: 2914 - RNA, 19 nt, artificial
  RNA for silencing
uguggcccccaccacaucc

SEQ ID NO: 2915 - RNA, 19 nt, artificial
  RNA for silencing
guggcccccaccacauccg

SEQ ID NO: 2916 - RNA, 19 nt, artificial
  RNA for silencing
uggcccccaccacauccgc

SEQ ID NO: 2917 - RNA, 19 nt, artificial
  RNA for silencing
ggcccccaccacauccgcc

SEQ ID NO: 2918 - RNA, 19 nt, artificial
  RNA for silencing
gcccccaccacauccgcca

SEQ ID NO: 2919 - RNA, 19 nt, artificial
  RNA for silencing
cccccaccacauccgccag

SEQ ID NO: 2920 - RNA, 19 nt, artificial
  RNA for silencing
ccccaccacauccgccagc

SEQ ID NO: 2921 - RNA, 19 nt, artificial
  RNA for silencing
cccaccacauccgccagcc

SEQ ID NO: 2922 - RNA, 19 nt, artificial
  RNA for silencing
ccaccacauccgccagccc

SEQ ID NO: 2923 - RNA, 19 nt, artificial
  RNA for silencing
caccacauccgccagcccu

SEQ ID NO: 2924 - RNA, 19 nt, artificial
  RNA for silencing
accacauccgccagcccug

SEQ ID NO: 2925 - RNA, 19 nt, artificial
  RNA for silencing
ccacauccgccagcccugc

SEQ ID NO: 2926 - RNA, 19 nt, artificial
  RNA for silencing
cacauccgccagcccugcc

SEQ ID NO: 2927 - RNA, 19 nt, artificial
  RNA for silencing
acauccgccagcccugccc

SEQ ID NO: 2928 - RNA, 19 nt, artificial
  RNA for silencing
cauccgccagcccugccca

SEQ ID NO: 2929 - RNA, 19 nt, artificial
  RNA for silencing
auccgccagcccugcccaa

SEQ ID NO: 2930 - RNA, 19 nt, artificial
  RNA for silencing
uccgccagcccugcccaau

SEQ ID NO: 2931 - RNA, 19 nt, artificial
  RNA for silencing
ccgccagcccugcccaaua

SEQ ID NO: 2932 - RNA, 19 nt, artificial
  RNA for silencing
cgccagcccugcccaauag

SEQ ID NO: 2933 - RNA, 19 nt, artificial
  RNA for silencing
gccagcccugcccaauagc

SEQ ID NO: 2934 - RNA, 19 nt, artificial
  RNA for silencing
ccagcccugcccaauagcu

SEQ ID NO: 2935 - RNA, 19 nt, artificial
  RNA for silencing
cagcccugcccaauagcug

SEQ ID NO: 2936 - RNA, 19 nt, artificial
  RNA for silencing
agcccugcccaauagcugc

SEQ ID NO: 2937 - RNA, 19 nt, artificial
  RNA for silencing
gcccugcccaauagcugcc

SEQ ID NO: 2938 - RNA, 19 nt, artificial
  RNA for silencing
cccugcccaauagcugccc

SEQ ID NO: 2939 - RNA, 19 nt, artificial
  RNA for silencing
ccugcccaauagcugcccc

SEQ ID NO: 2940 - RNA, 19 nt, artificial
  RNA for silencing
cugcccaauagcugccccu

SEQ ID NO: 2941 - RNA, 19 nt, artificial
  RNA for silencing
ugcccaauagcugccccuu

SEQ ID NO: 2942 - RNA, 19 nt, artificial
  RNA for silencing
gcccaauagcugccccuuu

SEQ ID NO: 2943 - RNA, 19 nt, artificial
  RNA for silencing
cccaauagcugccccuuua

SEQ ID NO: 2944 - RNA, 19 nt, artificial
  RNA for silencing
ccaauagcugccccuuuac

SEQ ID NO: 2945 - RNA, 19 nt, artificial
  RNA for silencing
caauagcugccccuuuacg

SEQ ID NO: 2946 - RNA, 19 nt, artificial
  RNA for silencing
aauagcugccccuuuacgu

SEQ ID NO: 2947 - RNA, 19 nt, artificial
  RNA for silencing
auagcugccccuuuacguc

SEQ ID NO: 2948 - RNA, 19 nt, artificial
  RNA for silencing
uagcugccccuuuacguca

SEQ ID NO: 2949 - RNA, 19 nt, artificial
  RNA for silencing
agcugccccuuuacgucac

SEQ ID NO: 2950 - RNA, 19 nt, artificial
  RNA for silencing
gcugccccuuuacgucacc

SEQ ID NO: 2951 - RNA, 19 nt, artificial
  RNA for silencing
cugccccuuuacgucaccu

SEQ ID NO: 2952 - RNA, 19 nt, artificial
  RNA for silencing
ugccccuuuacgucaccug

SEQ ID NO: 2953 - RNA, 19 nt, artificial
  RNA for silencing
gccccuuuacgucaccuga

SEQ ID NO: 2954 - RNA, 19 nt, artificial
  RNA for silencing
ccccuuuacgucaccugac

SEQ ID NO: 2955 - RNA, 19 nt, artificial
  RNA for silencing
cccuuuacgucaccugacg

SEQ ID NO: 2956 - RNA, 19 nt, artificial
  RNA for silencing
ccuuuacgucaccugacgg

SEQ ID NO: 2957 - RNA, 19 nt, artificial
  RNA for silencing
cuuuacgucaccugacggc

SEQ ID NO: 2958 - RNA, 19 nt, artificial
  RNA for silencing
uuuacgucaccugacggca

SEQ ID NO: 2959 - RNA, 19 nt, artificial
  RNA for silencing
uuacgucaccugacggcaa

SEQ ID NO: 2960 - RNA, 19 nt, artificial
  RNA for silencing
uacgucaccugacggcaag

SEQ ID NO: 2961 - RNA, 19 nt, artificial
  RNA for silencing
acgucaccugacggcaaga

SEQ ID NO: 2962 - RNA, 19 nt, artificial
  RNA for silencing
cgucaccugacggcaagac

SEQ ID NO: 2963 - RNA, 19 nt, artificial
  RNA for silencing
gucaccugacggcaagacu

SEQ ID NO: 2964 - RNA, 19 nt, artificial
  RNA for silencing
ucaccugacggcaagacuu

SEQ ID NO: 2965 - RNA, 19 nt, artificial
  RNA for silencing
caccugacggcaagacuuc

SEQ ID NO: 2966 - RNA, 19 nt, artificial
  RNA for silencing
accugacggcaagacuuca

SEQ ID NO: 2967 - RNA, 19 nt, artificial
  RNA for silencing
ccugacggcaagacuucau

SEQ ID NO: 2968 - RNA, 19 nt, artificial
  RNA for silencing
cugacggcaagacuucauu

SEQ ID NO: 2969 - RNA, 19 nt, artificial
  RNA for silencing
ugacggcaagacuucauug

SEQ ID NO: 2970 - RNA, 19 nt, artificial
  RNA for silencing
gacggcaagacuucauugc

SEQ ID NO: 2971 - RNA, 19 nt, artificial
  RNA for silencing
acggcaagacuucauugcu

SEQ ID NO: 2972 - RNA, 19 nt, artificial
  RNA for silencing
cggcaagacuucauugcug

SEQ ID NO: 2973 - RNA, 19 nt, artificial
  RNA for silencing
ggcaagacuucauugcugc

SEQ ID NO: 2974 - RNA, 19 nt, artificial
  RNA for silencing
gcaagacuucauugcugcu

SEQ ID NO: 2975 - RNA, 19 nt, artificial
  RNA for silencing
caagacuucauugcugcua

SEQ ID NO: 2976 - RNA, 19 nt, artificial
  RNA for silencing
aagacuucauugcugcuau

SEQ ID NO: 2977 - RNA, 19 nt, artificial
  RNA for silencing
agacuucauugcugcuaug

SEQ ID NO: 2978 - RNA, 19 nt, artificial
  RNA for silencing
gacuucauugcugcuaugu

SEQ ID NO: 2979 - RNA, 19 nt, artificial
  RNA for silencing
acuucauugcugcuaugua

SEQ ID NO: 2980 - RNA, 19 nt, artificial
  RNA for silencing
cuucauugcugcuauguau

SEQ ID NO: 2981 - RNA, 19 nt, artificial
  RNA for silencing
uucauugcugcuauguaua

SEQ ID NO: 2982 - RNA, 19 nt, artificial
  RNA for silencing
ucauugcugcuauguauau

SEQ ID NO: 2983 - RNA, 19 nt, artificial
  RNA for silencing
cauugcugcuauguauaug

SEQ ID NO: 2984 - RNA, 19 nt, artificial
  RNA for silencing
auugcugcuauguauauga

SEQ ID NO: 2985 - RNA, 19 nt, artificial
  RNA for silencing
uugcugcuauguauaugaa

SEQ ID NO: 2986 - RNA, 19 nt, artificial
  RNA for silencing
ugcugcuauguauaugaaa

SEQ ID NO: 2987 - RNA, 19 nt, artificial
  RNA for silencing
gcugcuauguauaugaaag

SEQ ID NO: 2988 - RNA, 19 nt, artificial
  RNA for silencing
cugcuauguauaugaaagc

SEQ ID NO: 2989 - RNA, 19 nt, artificial
  RNA for silencing
ugcuauguauaugaaagcu

SEQ ID NO: 2990 - RNA, 19 nt, artificial
  RNA for silencing
gcuauguauaugaaagcuu

SEQ ID NO: 2991 - RNA, 19 nt, artificial
  RNA for silencing
cuauguauaugaaagcuuu

SEQ ID NO: 2992 - RNA, 19 nt, artificial
  RNA for silencing
uauguauaugaaagcuuua

SEQ ID NO: 2993 - RNA, 19 nt, artificial
  RNA for silencing
auguauaugaaagcuuuau

SEQ ID NO: 2994 - RNA, 19 nt, artificial
  RNA for silencing
uguauaugaaagcuuuauu

SEQ ID NO: 2995 - RNA, 19 nt, artificial
  RNA for silencing
guauaugaaagcuuuauug

SEQ ID NO: 2996 - RNA, 19 nt, artificial
  RNA for silencing
uauaugaaagcuuuauuga

SEQ ID NO: 2997 - RNA, 19 nt, artificial
  RNA for silencing
auaugaaagcuuuauugaa

SEQ ID NO: 2998 - RNA, 19 nt, artificial
  RNA for silencing
uaugaaagcuuuauugaac

SEQ ID NO: 2999 - RNA, 19 nt, artificial
  RNA for silencing
augaaagcuuuauugaacc

SEQ ID NO: 3000 - RNA, 19 nt, artificial
  RNA for silencing
ugaaagcuuuauugaacca

SEQ ID NO: 3001 - RNA, 19 nt, artificial
  RNA for silencing
gaaagcuuuauugaaccag

SEQ ID NO: 3002 - RNA, 19 nt, artificial
  RNA for silencing
aaagcuuuauugaaccaga

SEQ ID NO: 3003 - RNA, 19 nt, artificial
  RNA for silencing
aagcuuuauugaaccagag

SEQ ID NO: 3004 - RNA, 19 nt, artificial
  RNA for silencing
agcuuuauugaaccagagc

SEQ ID NO: 3005 - RNA, 19 nt, artificial
  RNA for silencing
gcuuuauugaaccagagca

SEQ ID NO: 3006 - RNA, 19 nt, artificial
  RNA for silencing
cuuuauugaaccagagcac

SEQ ID NO: 3007 - RNA, 19 nt, artificial
  RNA for silencing
uuuauugaaccagagcacu

SEQ ID NO: 3008 - RNA, 19 nt, artificial
  RNA for silencing
uuauugaaccagagcacug

SEQ ID NO: 3009 - RNA, 19 nt, artificial
  RNA for silencing
uauugaaccagagcacugc

SEQ ID NO: 3010 - RNA, 19 nt, artificial
  RNA for silencing
auugaaccagagcacugcu

SEQ ID NO: 3011 - RNA, 19 nt, artificial
  RNA for silencing
uugaaccagagcacugcua

SEQ ID NO: 3012 - RNA, 19 nt, artificial
  RNA for silencing
ugaaccagagcacugcuac

SEQ ID NO: 3013 - RNA, 19 nt, artificial
  RNA for silencing
gaaccagagcacugcuaca

SEQ ID NO: 3014 - RNA, 19 nt, artificial
  RNA for silencing
aaccagagcacugcuacac

SEQ ID NO: 3015 - RNA, 19 nt, artificial
  RNA for silencing
accagagcacugcuacaca

SEQ ID NO: 3016 - RNA, 19 nt, artificial
  RNA for silencing
ccagagcacugcuacacaa

SEQ ID NO: 3017 - RNA, 19 nt, artificial
  RNA for silencing
cagagcacugcuacacaac

SEQ ID NO: 3018 - RNA, 19 nt, artificial
  RNA for silencing
agagcacugcuacacaaca

SEQ ID NO: 3019 - RNA, 19 nt, artificial
  RNA for silencing
gagcacugcuacacaacau

SEQ ID NO: 3020 - RNA, 19 nt, artificial
  RNA for silencing
agcacugcuacacaacauu

SEQ ID NO: 3021 - RNA, 19 nt, artificial
  RNA for silencing
gcacugcuacacaacauua

SEQ ID NO: 3022 - RNA, 19 nt, artificial
  RNA for silencing
cacugcuacacaacauuac

SEQ ID NO: 3023 - RNA, 19 nt, artificial
  RNA for silencing
acugcuacacaacauuaca

SEQ ID NO: 3024 - RNA, 19 nt, artificial
  RNA for silencing
cugcuacacaacauuacac

SEQ ID NO: 3025 - RNA, 19 nt, artificial
  RNA for silencing
ugcuacacaacauuacaca

SEQ ID NO: 3026 - RNA, 19 nt, artificial
  RNA for silencing
gcuacacaacauuacacau

SEQ ID NO: 3027 - RNA, 19 nt, artificial
  RNA for silencing
cuacacaacauuacacaug

SEQ ID NO: 3028 - RNA, 19 nt, artificial
  RNA for silencing
uacacaacauuacacaugu

SEQ ID NO: 3029 - RNA, 19 nt, artificial
  RNA for silencing
acacaacauuacacauguc

SEQ ID NO: 3030 - RNA, 19 nt, artificial
  RNA for silencing
cacaacauuacacauguca

SEQ ID NO: 3031 - RNA, 19 nt, artificial
  RNA for silencing
acaacauuacacaugucag

SEQ ID NO: 3032 - RNA, 19 nt, artificial
  RNA for silencing
caacauuacacaugucaga

SEQ ID NO: 3033 - RNA, 19 nt, artificial
  RNA for silencing
aacauuacacaugucagaa

SEQ ID NO: 3034 - RNA, 19 nt, artificial
  RNA for silencing
acauuacacaugucagaaa

SEQ ID NO: 3035 - RNA, 19 nt, artificial
  RNA for silencing
cauuacacaugucagaaag

SEQ ID NO: 3036 - RNA, 19 nt, artificial
  RNA for silencing
auuacacaugucagaaaga

SEQ ID NO: 3037 - RNA, 19 nt, artificial
  RNA for silencing
uuacacaugucagaaagac

SEQ ID NO: 3038 - RNA, 19 nt, artificial
  RNA for silencing
uacacaugucagaaagaca

SEQ ID NO: 3039 - RNA, 19 nt, artificial
  RNA for silencing
acacaugucagaaagacag

SEQ ID NO: 3040 - RNA, 19 nt, artificial
  RNA for silencing
cacaugucagaaagacaga

SEQ ID NO: 3041 - RNA, 19 nt, artificial
  RNA for silencing
acaugucagaaagacagag

SEQ ID NO: 3042 - RNA, 19 nt, artificial
  RNA for silencing
caugucagaaagacagagc

SEQ ID NO: 3043 - RNA, 19 nt, artificial
  RNA for silencing
augucagaaagacagagcu

SEQ ID NO: 3044 - RNA, 19 nt, artificial
  RNA for silencing
ugucagaaagacagagcua

SEQ ID NO: 3045 - RNA, 19 nt, artificial
  RNA for silencing
gucagaaagacagagcuau

SEQ ID NO: 3046 - RNA, 19 nt, artificial
  RNA for silencing
ucagaaagacagagcuaua

SEQ ID NO: 3047 - RNA, 19 nt, artificial
  RNA for silencing
cagaaagacagagcuauac

SEQ ID NO: 3048 - RNA, 19 nt, artificial
  RNA for silencing
agaaagacagagcuauacu

SEQ ID NO: 3049 - RNA, 19 nt, artificial
  RNA for silencing
gaaagacagagcuauacuc

SEQ ID NO: 3050 - RNA, 19 nt, artificial
  RNA for silencing
aaagacagagcuauacucc

SEQ ID NO: 3051 - RNA, 19 nt, artificial
  RNA for silencing
aagacagagcuauacuccu

SEQ ID NO: 3052 - RNA, 19 nt, artificial
  RNA for silencing
agacagagcuauacuccua

SEQ ID NO: 3053 - RNA, 19 nt, artificial
  RNA for silencing
gacagagcuauacuccuag

SEQ ID NO: 3054 - RNA, 19 nt, artificial
  RNA for silencing
acagagcuauacuccuaga

SEQ ID NO: 3055 - RNA, 19 nt, artificial
  RNA for silencing
cagagcuauacuccuagac

SEQ ID NO: 3056 - RNA, 19 nt, artificial
  RNA for silencing
agagcuauacuccuagacu

SEQ ID NO: 3057 - RNA, 19 nt, artificial
  RNA for silencing
gagcuauacuccuagacuc

SEQ ID NO: 3058 - RNA, 19 nt, artificial
  RNA for silencing
agcuauacuccuagacucg

SEQ ID NO: 3059 - RNA, 19 nt, artificial
  RNA for silencing
gcuauacuccuagacucga

SEQ ID NO: 3060 - RNA, 19 nt, artificial
  RNA for silencing
cuauacuccuagacucgac

SEQ ID NO: 3061 - RNA, 19 nt, artificial
  RNA for silencing
uauacuccuagacucgaca

SEQ ID NO: 3062 - RNA, 19 nt, artificial
  RNA for silencing
auacuccuagacucgacag

SEQ ID NO: 3063 - RNA, 19 nt, artificial
  RNA for silencing
uacuccuagacucgacaga

SEQ ID NO: 3064 - RNA, 19 nt, artificial
  RNA for silencing
acuccuagacucgacagaa

SEQ ID NO: 3065 - RNA, 19 nt, artificial
  RNA for silencing
cuccuagacucgacagaag

SEQ ID NO: 3066 - RNA, 19 nt, artificial
  RNA for silencing
uccuagacucgacagaagc

SEQ ID NO: 3067 - RNA, 19 nt, artificial
  RNA for silencing
ccuagacucgacagaagcc

SEQ ID NO: 3068 - RNA, 19 nt, artificial
  RNA for silencing
cuagacucgacagaagcca

SEQ ID NO: 3069 - RNA, 19 nt, artificial
  RNA for silencing
uagacucgacagaagccac

SEQ ID NO: 3070 - RNA, 19 nt, artificial
  RNA for silencing
agacucgacagaagccaca

SEQ ID NO: 3071 - RNA, 19 nt, artificial
  RNA for silencing
gacucgacagaagccacau

SEQ ID NO: 3072 - RNA, 19 nt, artificial
  RNA for silencing
acucgacagaagccacauc

SEQ ID NO: 3073 - RNA, 19 nt, artificial
  RNA for silencing
cucgacagaagccacaucc

SEQ ID NO: 3074 - RNA, 19 nt, artificial
  RNA for silencing
ucgacagaagccacaucca

SEQ ID NO: 3075 - RNA, 19 nt, artificial
  RNA for silencing
cgacagaagccacauccac

SEQ ID NO: 3076 - RNA, 19 nt, artificial
  RNA for silencing
gacagaagccacauccaca

SEQ ID NO: 3077 - RNA, 19 nt, artificial
  RNA for silencing
acagaagccacauccacaa

SEQ ID NO: 3078 - RNA, 19 nt, artificial
  RNA for silencing
cagaagccacauccacaac

SEQ ID NO: 3079 - RNA, 19 nt, artificial
  RNA for silencing
agaagccacauccacaaca

SEQ ID NO: 3080 - RNA, 19 nt, artificial
  RNA for silencing
gaagccacauccacaacac

SEQ ID NO: 3081 - RNA, 19 nt, artificial
  RNA for silencing
aagccacauccacaacacu

SEQ ID NO: 3082 - RNA, 19 nt, artificial
  RNA for silencing
agccacauccacaacacuu

SEQ ID NO: 3083 - RNA, 19 nt, artificial
  RNA for silencing
gccacauccacaacacuua

SEQ ID NO: 3084 - RNA, 19 nt, artificial
  RNA for silencing
ccacauccacaacacuuaa

SEQ ID NO: 3085 - RNA, 19 nt, artificial
  RNA for silencing
cacauccacaacacuuaag

SEQ ID NO: 3086 - RNA, 19 nt, artificial
  RNA for silencing
acauccacaacacuuaagg

SEQ ID NO: 3087 - RNA, 19 nt, artificial
  RNA for silencing
cauccacaacacuuaagga

SEQ ID NO: 3088 - RNA, 19 nt, artificial
  RNA for silencing
auccacaacacuuaaggag

SEQ ID NO: 3089 - RNA, 19 nt, artificial
  RNA for silencing
uccacaacacuuaaggagg

SEQ ID NO: 3090 - RNA, 19 nt, artificial
  RNA for silencing
ccacaacacuuaaggaggc

SEQ ID NO: 3091 - RNA, 19 nt, artificial
  RNA for silencing
cacaacacuuaaggaggcg

SEQ ID NO: 3092 - RNA, 19 nt, artificial
  RNA for silencing
acaacacuuaaggaggcgg

SEQ ID NO: 3093 - RNA, 19 nt, artificial
  RNA for silencing
caacacuuaaggaggcggu

SEQ ID NO: 3094 - RNA, 19 nt, artificial
  RNA for silencing
aacacuuaaggaggcggua

SEQ ID NO: 3095 - RNA, 19 nt, artificial
  RNA for silencing
acacuuaaggaggcgguac

SEQ ID NO: 3096 - RNA, 19 nt, artificial
  RNA for silencing
cacuuaaggaggcgguacc

SEQ ID NO: 3097 - RNA, 19 nt, artificial
  RNA for silencing
acuuaaggaggcgguaccc

SEQ ID NO: 3098 - RNA, 19 nt, artificial
  RNA for silencing
cuuaaggaggcgguacccc

SEQ ID NO: 3099 - RNA, 19 nt, artificial
  RNA for silencing
uuaaggaggcgguaccccc

SEQ ID NO: 3100 - RNA, 19 nt, artificial
  RNA for silencing
uaaggaggcgguacccccg

SEQ ID NO: 3101 - RNA, 19 nt, artificial
  RNA for silencing
aaggaggcgguacccccgg

SEQ ID NO: 3102 - RNA, 19 nt, artificial
  RNA for silencing
aggaggcgguacccccggc

SEQ ID NO: 3103 - RNA, 19 nt, artificial
  RNA for silencing
ggaggcgguacccccggca

SEQ ID NO: 3104 - RNA, 19 nt, artificial
  RNA for silencing
gaggcgguacccccggcac

SEQ ID NO: 3105 - RNA, 19 nt, artificial
  RNA for silencing
aggcgguacccccggcacc

SEQ ID NO: 3106 - RNA, 19 nt, artificial
  RNA for silencing
ggcgguacccccggcacca

SEQ ID NO: 3107 - RNA, 19 nt, artificial
  RNA for silencing
gcgguacccccggcaccau

SEQ ID NO: 3108 - RNA, 19 nt, artificial
  RNA for silencing
cgguacccccggcaccaug

SEQ ID NO: 3109 - RNA, 19 nt, artificial
  RNA for silencing
gguacccccggcaccauga

SEQ ID NO: 3110 - RNA, 19 nt, artificial
  RNA for silencing
guacccccggcaccaugaa

SEQ ID NO: 3111 - RNA, 19 nt, artificial
  RNA for silencing
uacccccggcaccaugaau

SEQ ID NO: 3112 - RNA, 19 nt, artificial
  RNA for silencing
acccccggcaccaugaaug

SEQ ID NO: 3113 - RNA, 19 nt, artificial
  RNA for silencing
cccccggcaccaugaaugg

SEQ ID NO: 3114 - RNA, 19 nt, artificial
  RNA for silencing
ccccggcaccaugaauggc

SEQ ID NO: 3115 - RNA, 19 nt, artificial
  RNA for silencing
cccggcaccaugaauggca

SEQ ID NO: 3116 - RNA, 19 nt, artificial
  RNA for silencing
ccggcaccaugaauggcau

SEQ ID NO: 3117 - RNA, 19 nt, artificial
  RNA for silencing
cggcaccaugaauggcauc

SEQ ID NO: 3118 - RNA, 19 nt, artificial
  RNA for silencing
ggcaccaugaauggcaucc

SEQ ID NO: 3119 - RNA, 19 nt, artificial
  RNA for silencing
gcaccaugaauggcaucca

SEQ ID NO: 3120 - RNA, 19 nt, artificial
  RNA for silencing
caccaugaauggcauccau

SEQ ID NO: 3121 - RNA, 19 nt, artificial
  RNA for silencing
accaugaauggcauccauu

SEQ ID NO: 3122 - RNA, 19 nt, artificial
  RNA for silencing
ccaugaauggcauccauug

SEQ ID NO: 3123 - RNA, 19 nt, artificial
  RNA for silencing
caugaauggcauccauugg

SEQ ID NO: 3124 - RNA, 19 nt, artificial
  RNA for silencing
augaauggcauccauuggg

SEQ ID NO: 3125 - RNA, 19 nt, artificial
  RNA for silencing
ugaauggcauccauugggg

SEQ ID NO: 3126 - RNA, 19 nt, artificial
  RNA for silencing
gaauggcauccauuggggc

SEQ ID NO: 3127 - RNA, 19 nt, artificial
  RNA for silencing
aauggcauccauuggggca

SEQ ID NO: 3128 - RNA, 19 nt, artificial
  RNA for silencing
auggcauccauuggggcag

SEQ ID NO: 3129 - RNA, 19 nt, artificial
  RNA for silencing
uggcauccauuggggcagu

SEQ ID NO: 3130 - RNA, 19 nt, artificial
  RNA for silencing
ggcauccauuggggcagug

SEQ ID NO: 3131 - RNA, 19 nt, artificial
  RNA for silencing
gcauccauuggggcagugg

SEQ ID NO: 3132 - RNA, 19 nt, artificial
  RNA for silencing
cauccauuggggcaguggg

SEQ ID NO: 3133 - RNA, 19 nt, artificial
  RNA for silencing
auccauuggggcaguggga

SEQ ID NO: 3134 - RNA, 19 nt, artificial
  RNA for silencing
uccauuggggcagugggac

SEQ ID NO: 3135 - RNA, 19 nt, artificial
  RNA for silencing
ccauuggggcagugggaca

SEQ ID NO: 3136 - RNA, 19 nt, artificial
  RNA for silencing
cauuggggcagugggacac

SEQ ID NO: 3137 - RNA, 19 nt, artificial
  RNA for silencing
auuggggcagugggacacu

SEQ ID NO: 3138 - RNA, 19 nt, artificial
  RNA for silencing
uuggggcagugggacacug

SEQ ID NO: 3139 - RNA, 19 nt, artificial
  RNA for silencing
uggggcagugggacacugc

SEQ ID NO: 3140 - RNA, 19 nt, artificial
  RNA for silencing
ggggcagugggacacugca

SEQ ID NO: 3141 - RNA, 19 nt, artificial
  RNA for silencing
gggcagugggacacugcag

SEQ ID NO: 3142 - RNA, 19 nt, artificial
  RNA for silencing
ggcagugggacacugcagg

SEQ ID NO: 3143 - RNA, 19 nt, artificial
  RNA for silencing
gcagugggacacugcagga

SEQ ID NO: 3144 - RNA, 19 nt, artificial
  RNA for silencing
cagugggacacugcaggac

SEQ ID NO: 3145 - RNA, 19 nt, artificial
  RNA for silencing
agugggacacugcaggacc

SEQ ID NO: 3146 - RNA, 19 nt, artificial
  RNA for silencing
gugggacacugcaggacca

SEQ ID NO: 3147 - RNA, 19 nt, artificial
  RNA for silencing
ugggacacugcaggaccag

SEQ ID NO: 3148 - RNA, 19 nt, artificial
  RNA for silencing
gggacacugcaggaccaga

SEQ ID NO: 3149 - RNA, 19 nt, artificial
  RNA for silencing
ggacacugcaggaccagag

SEQ ID NO: 3150 - RNA, 19 nt, artificial
  RNA for silencing
gacacugcaggaccagagg

SEQ ID NO: 3151 - RNA, 19 nt, artificial
  RNA for silencing
acacugcaggaccagaggu

SEQ ID NO: 3152 - RNA, 19 nt, artificial
  RNA for silencing
cacugcaggaccagaggug

SEQ ID NO: 3153 - RNA, 19 nt, artificial
  RNA for silencing
acugcaggaccagagguga

SEQ ID NO: 3154 - RNA, 19 nt, artificial
  RNA for silencing
cugcaggaccagaggugag

SEQ ID NO: 3155 - RNA, 19 nt, artificial
  RNA for silencing
ugcaggaccagaggugagg

SEQ ID NO: 3156 - RNA, 19 nt, artificial
  RNA for silencing
gcaggaccagaggugagga

SEQ ID NO: 3157 - RNA, 19 nt, artificial
  RNA for silencing
caggaccagaggugaggau

SEQ ID NO: 3158 - RNA, 19 nt, artificial
  RNA for silencing
aggaccagaggugaggaug

SEQ ID NO: 3159 - RNA, 19 nt, artificial
  RNA for silencing
ggaccagaggugaggauga

SEQ ID NO: 3160 - RNA, 19 nt, artificial
  RNA for silencing
gaccagaggugaggaugaa

SEQ ID NO: 3161 - RNA, 19 nt, artificial
  RNA for silencing
accagaggugaggaugaac

SEQ ID NO: 3162 - RNA, 19 nt, artificial
  RNA for silencing
ccagaggugaggaugaacc

SEQ ID NO: 3163 - RNA, 19 nt, artificial
  RNA for silencing
cagaggugaggaugaacca

SEQ ID NO: 3164 - RNA, 19 nt, artificial
  RNA for silencing
agaggugaggaugaaccaa

SEQ ID NO: 3165 - RNA, 19 nt, artificial
  RNA for silencing
gaggugaggaugaaccaag

SEQ ID NO: 3166 - RNA, 19 nt, artificial
  RNA for silencing
aggugaggaugaaccaagg

SEQ ID NO: 3167 - RNA, 19 nt, artificial
  RNA for silencing
ggugaggaugaaccaagga

SEQ ID NO: 3168 - RNA, 19 nt, artificial
  RNA for silencing
gugaggaugaaccaaggau

SEQ ID NO: 3169 - RNA, 19 nt, artificial
  RNA for silencing
ugaggaugaaccaaggaug

SEQ ID NO: 3170 - RNA, 19 nt, artificial
  RNA for silencing
gaggaugaaccaaggaugg

SEQ ID NO: 3171 - RNA, 19 nt, artificial
  RNA for silencing
aggaugaaccaaggauggg

SEQ ID NO: 3172 - RNA, 19 nt, artificial
  RNA for silencing
ggaugaaccaaggaugggg

SEQ ID NO: 3173 - RNA, 19 nt, artificial
  RNA for silencing
gaugaaccaaggauggggg

SEQ ID NO: 3174 - RNA, 19 nt, artificial
  RNA for silencing
augaaccaaggaugggggc

SEQ ID NO: 3175 - RNA, 19 nt, artificial
  RNA for silencing
ugaaccaaggaugggggca

SEQ ID NO: 3176 - RNA, 19 nt, artificial
  RNA for silencing
gaaccaaggaugggggcau

SEQ ID NO: 3177 - RNA, 19 nt, artificial
  RNA for silencing
aaccaaggaugggggcaug

SEQ ID NO: 3178 - RNA, 19 nt, artificial
  RNA for silencing
accaaggaugggggcaugg

SEQ ID NO: 3179 - RNA, 19 nt, artificial
  RNA for silencing
ccaaggaugggggcauggg

SEQ ID NO: 3180 - RNA, 19 nt, artificial
  RNA for silencing
caaggaugggggcaugggg

SEQ ID NO: 3181 - RNA, 19 nt, artificial
  RNA for silencing
aaggaugggggcauggggc

SEQ ID NO: 3182 - RNA, 19 nt, artificial
  RNA for silencing
aggaugggggcauggggcc

SEQ ID NO: 3183 - RNA, 19 nt, artificial
  RNA for silencing
ggaugggggcauggggccu

SEQ ID NO: 3184 - RNA, 19 nt, artificial
  RNA for silencing
gaugggggcauggggccuu

SEQ ID NO: 3185 - RNA, 19 nt, artificial
  RNA for silencing
augggggcauggggccuug

SEQ ID NO: 3186 - RNA, 19 nt, artificial
  RNA for silencing
ugggggcauggggccuugg

SEQ ID NO: 3187 - RNA, 19 nt, artificial
  RNA for silencing
gggggcauggggccuuggg

SEQ ID NO: 3188 - RNA, 19 nt, artificial
  RNA for silencing
ggggcauggggccuuggga

SEQ ID NO: 3189 - RNA, 19 nt, artificial
  RNA for silencing
gggcauggggccuugggac

SEQ ID NO: 3190 - RNA, 19 nt, artificial
  RNA for silencing
ggcauggggccuugggaca

SEQ ID NO: 3191 - RNA, 19 nt, artificial
  RNA for silencing
gcauggggccuugggacac

SEQ ID NO: 3192 - RNA, 19 nt, artificial
  RNA for silencing
cauggggccuugggacacu

SEQ ID NO: 3193 - RNA, 19 nt, artificial
  RNA for silencing
auggggccuugggacacuu

SEQ ID NO: 3194 - RNA, 19 nt, artificial
  RNA for silencing
uggggccuugggacacuug

SEQ ID NO: 3195 - RNA, 19 nt, artificial
  RNA for silencing
ggggccuugggacacuugc

SEQ ID NO: 3196 - RNA, 19 nt, artificial
  RNA for silencing
gggccuugggacacuugcc

SEQ ID NO: 3197 - RNA, 19 nt, artificial
  RNA for silencing
ggccuugggacacuugccu

SEQ ID NO: 3198 - RNA, 19 nt, artificial
  RNA for silencing
gccuugggacacuugccuu

SEQ ID NO: 3199 - RNA, 19 nt, artificial
  RNA for silencing
ccuugggacacuugccuug

SEQ ID NO: 3200 - RNA, 19 nt, artificial
  RNA for silencing
cuugggacacuugccuugu

SEQ ID NO: 3201 - RNA, 19 nt, artificial
  RNA for silencing
uugggacacuugccuugug

SEQ ID NO: 3202 - RNA, 19 nt, artificial
  RNA for silencing
ugggacacuugccuugugc

SEQ ID NO: 3203 - RNA, 19 nt, artificial
  RNA for silencing
gggacacuugccuugugcc

SEQ ID NO: 3204 - RNA, 19 nt, artificial
  RNA for silencing
ggacacuugccuugugccc

SEQ ID NO: 3205 - RNA, 19 nt, artificial
  RNA for silencing
gacacuugccuugugccca

SEQ ID NO: 3206 - RNA, 19 nt, artificial
  RNA for silencing
acacuugccuugugcccag

SEQ ID NO: 3207 - RNA, 19 nt, artificial
  RNA for silencing
cacuugccuugugcccagc

SEQ ID NO: 3208 - RNA, 19 nt, artificial
  RNA for silencing
acuugccuugugcccagcc

SEQ ID NO: 3209 - RNA, 19 nt, artificial
  RNA for silencing
cuugccuugugcccagcca

SEQ ID NO: 3210 - RNA, 19 nt, artificial
  RNA for silencing
uugccuugugcccagccag

SEQ ID NO: 3211 - RNA, 19 nt, artificial
  RNA for silencing
ugccuugugcccagccagc

SEQ ID NO: 3212 - RNA, 19 nt, artificial
  RNA for silencing
gccuugugcccagccagcc

SEQ ID NO: 3213 - RNA, 19 nt, artificial
  RNA for silencing
ccuugugcccagccagcca

SEQ ID NO: 3214 - RNA, 19 nt, artificial
  RNA for silencing
cuugugcccagccagccac

SEQ ID NO: 3215 - RNA, 19 nt, artificial
  RNA for silencing
uugugcccagccagccacg

SEQ ID NO: 3216 - RNA, 19 nt, artificial
  RNA for silencing
ugugcccagccagccacgu

SEQ ID NO: 3217 - RNA, 19 nt, artificial
  RNA for silencing
gugcccagccagccacgug

SEQ ID NO: 3218 - RNA, 19 nt, artificial
  RNA for silencing
ugcccagccagccacgugg

SEQ ID NO: 3219 - RNA, 19 nt, artificial
  RNA for silencing
gcccagccagccacgugga

SEQ ID NO: 3220 - RNA, 19 nt, artificial
  RNA for silencing
cccagccagccacguggac

SEQ ID NO: 3221 - RNA, 19 nt, artificial
  RNA for silencing
ccagccagccacguggacu

SEQ ID NO: 3222 - RNA, 19 nt, artificial
  RNA for silencing
cagccagccacguggacug

SEQ ID NO: 3223 - RNA, 19 nt, artificial
  RNA for silencing
agccagccacguggacugg

SEQ ID NO: 3224 - RNA, 19 nt, artificial
  RNA for silencing
gccagccacguggacugga

SEQ ID NO: 3225 - RNA, 19 nt, artificial
  RNA for silencing
ccagccacguggacuggau

SEQ ID NO: 3226 - RNA, 19 nt, artificial
  RNA for silencing
cagccacguggacuggauu

SEQ ID NO: 3227 - RNA, 19 nt, artificial
  RNA for silencing
agccacguggacuggauuu

SEQ ID NO: 3228 - RNA, 19 nt, artificial
  RNA for silencing
gccacguggacuggauuuc

SEQ ID NO: 3229 - RNA, 19 nt, artificial
  RNA for silencing
ccacguggacuggauuucu

SEQ ID NO: 3230 - RNA, 19 nt, artificial
  RNA for silencing
cacguggacuggauuucug

SEQ ID NO: 3231 - RNA, 19 nt, artificial
  RNA for silencing
acguggacuggauuucugc

SEQ ID NO: 3232 - RNA, 19 nt, artificial
  RNA for silencing
cguggacuggauuucugcu

SEQ ID NO: 3233 - RNA, 19 nt, artificial
  RNA for silencing
guggacuggauuucugcuc

SEQ ID NO: 3234 - RNA, 19 nt, artificial
  RNA for silencing
uggacuggauuucugcucu

SEQ ID NO: 3235 - RNA, 19 nt, artificial
  RNA for silencing
ggacuggauuucugcucuu

SEQ ID NO: 3236 - RNA, 19 nt, artificial
  RNA for silencing
gacuggauuucugcucuuc

SEQ ID NO: 3237 - RNA, 19 nt, artificial
  RNA for silencing
acuggauuucugcucuucc

SEQ ID NO: 3238 - RNA, 19 nt, artificial
  RNA for silencing
cuggauuucugcucuucca

SEQ ID NO: 3239 - RNA, 19 nt, artificial
  RNA for silencing
uggauuucugcucuuccag

SEQ ID NO: 3240 - RNA, 19 nt, artificial
  RNA for silencing
ggauuucugcucuuccaga

SEQ ID NO: 3241 - RNA, 19 nt, artificial
  RNA for silencing
gauuucugcucuuccagac

SEQ ID NO: 3242 - RNA, 19 nt, artificial
  RNA for silencing
auuucugcucuuccagacc

SEQ ID NO: 3243 - RNA, 19 nt, artificial
  RNA for silencing
uuucugcucuuccagaccg

SEQ ID NO: 3244 - RNA, 19 nt, artificial
  RNA for silencing
uucugcucuuccagaccgg

SEQ ID NO: 3245 - RNA, 19 nt, artificial
  RNA for silencing
ucugcucuuccagaccggg

SEQ ID NO: 3246 - RNA, 19 nt, artificial
  RNA for silencing
cugcucuuccagaccgggg

SEQ ID NO: 3247 - RNA, 19 nt, artificial
  RNA for silencing
ugcucuuccagaccgggga

SEQ ID NO: 3248 - RNA, 19 nt, artificial
  RNA for silencing
gcucuuccagaccggggaa

SEQ ID NO: 3249 - RNA, 19 nt, artificial
  RNA for silencing
cucuuccagaccggggaac

SEQ ID NO: 3250 - RNA, 19 nt, artificial
  RNA for silencing
ucuuccagaccggggaacu

SEQ ID NO: 3251 - RNA, 19 nt, artificial
  RNA for silencing
cuuccagaccggggaacug

SEQ ID NO: 3252 - RNA, 19 nt, artificial
  RNA for silencing
uuccagaccggggaacugg

SEQ ID NO: 3253 - RNA, 19 nt, artificial
  RNA for silencing
uccagaccggggaacugga

SEQ ID NO: 3254 - RNA, 19 nt, artificial
  RNA for silencing
ccagaccggggaacuggac

SEQ ID NO: 3255 - RNA, 19 nt, artificial
  RNA for silencing
cagaccggggaacuggacu

SEQ ID NO: 3256 - RNA, 19 nt, artificial
  RNA for silencing
agaccggggaacuggacuc

SEQ ID NO: 3257 - RNA, 19 nt, artificial
  RNA for silencing
gaccggggaacuggacuca

SEQ ID NO: 3258 - RNA, 19 nt, artificial
  RNA for silencing
accggggaacuggacucac

SEQ ID NO: 3259 - RNA, 19 nt, artificial
  RNA for silencing
ccggggaacuggacucaca

SEQ ID NO: 3260 - RNA, 19 nt, artificial
  RNA for silencing
cggggaacuggacucacau

SEQ ID NO: 3261 - RNA, 19 nt, artificial
  RNA for silencing
ggggaacuggacucacaua

SEQ ID NO: 3262 - RNA, 19 nt, artificial
  RNA for silencing
gggaacuggacucacauaa

SEQ ID NO: 3263 - RNA, 19 nt, artificial
  RNA for silencing
ggaacuggacucacauaaa

SEQ ID NO: 3264 - RNA, 19 nt, artificial
  RNA for silencing
gaacuggacucacauaaag

SEQ ID NO: 3265 - RNA, 19 nt, artificial
  RNA for silencing
aacuggacucacauaaagg

SEQ ID NO: 3266 - RNA, 19 nt, artificial
  RNA for silencing
acuggacucacauaaaggc

SEQ ID NO: 3267 - RNA, 19 nt, artificial
  RNA for silencing
cuggacucacauaaaggca

SEQ ID NO: 3268 - RNA, 19 nt, artificial
  RNA for silencing
uggacucacauaaaggcaa

SEQ ID NO: 3269 - RNA, 19 nt, artificial
  RNA for silencing
ggacucacauaaaggcaau

SEQ ID NO: 3270 - RNA, 19 nt, artificial
  RNA for silencing
gacucacauaaaggcaaug

SEQ ID NO: 3271 - RNA, 19 nt, artificial
  RNA for silencing
acucacauaaaggcaaugu

SEQ ID NO: 3272 - RNA, 19 nt, artificial
  RNA for silencing
cucacauaaaggcaauguc

SEQ ID NO: 3273 - RNA, 19 nt, artificial
  RNA for silencing
ucacauaaaggcaaugucc

SEQ ID NO: 3274 - RNA, 19 nt, artificial
  RNA for silencing
cacauaaaggcaauguccu

SEQ ID NO: 3275 - RNA, 19 nt, artificial
  RNA for silencing
acauaaaggcaauguccuc

SEQ ID NO: 3276 - RNA, 19 nt, artificial
  RNA for silencing
cauaaaggcaauguccucu

SEQ ID NO: 3277 - RNA, 19 nt, artificial
  RNA for silencing
auaaaggcaauguccucuu

SEQ ID NO: 3278 - RNA, 19 nt, artificial
  RNA for silencing
uaaaggcaauguccucuuu

SEQ ID NO: 3279 - RNA, 19 nt, artificial
  RNA for silencing
aaaggcaauguccucuuuc

SEQ ID NO: 3280 - RNA, 19 nt, artificial
  RNA for silencing
aaggcaauguccucuuucu

SEQ ID NO: 3281 - RNA, 19 nt, artificial
  RNA for silencing
aggcaauguccucuuucuc

SEQ ID NO: 3282 - RNA, 19 nt, artificial
  RNA for silencing
ggcaauguccucuuucucu

SEQ ID NO: 3283 - RNA, 19 nt, artificial
  RNA for silencing
gcaauguccucuuucucuu

SEQ ID NO: 3284 - RNA, 19 nt, artificial
  RNA for silencing
caauguccucuuucucuuc

SEQ ID NO: 3285 - RNA, 19 nt, artificial
  RNA for silencing
aauguccucuuucucuucc

SEQ ID NO: 3286 - RNA, 19 nt, artificial
  RNA for silencing
auguccucuuucucuuccc

SEQ ID NO: 3287 - RNA, 19 nt, artificial
  RNA for silencing
uguccucuuucucuucccc

SEQ ID NO: 3288 - RNA, 19 nt, artificial
  RNA for silencing
guccucuuucucuuccccc

SEQ ID NO: 3289 - RNA, 19 nt, artificial
  RNA for silencing
uccucuuucucuucccccc

SEQ ID NO: 3290 - RNA, 19 nt, artificial
  RNA for silencing
ccucuuucucuucccccca

SEQ ID NO: 3291 - RNA, 19 nt, artificial
  RNA for silencing
cucuuucucuuccccccaa

SEQ ID NO: 3292 - RNA, 19 nt, artificial
  RNA for silencing
ucuuucucuuccccccaac

SEQ ID NO: 3293 - RNA, 19 nt, artificial
  RNA for silencing
cuuucucuuccccccaacc

SEQ ID NO: 3294 - RNA, 19 nt, artificial
  RNA for silencing
uuucucuuccccccaaccc

SEQ ID NO: 3295 - RNA, 19 nt, artificial
  RNA for silencing
uucucuuccccccaacccu

SEQ ID NO: 3296 - RNA, 19 nt, artificial
  RNA for silencing
ucucuuccccccaacccuu

SEQ ID NO: 3297 - RNA, 19 nt, artificial
  RNA for silencing
cucuuccccccaacccuuu

SEQ ID NO: 3298 - RNA, 19 nt, artificial
  RNA for silencing
ucuuccccccaacccuuua

SEQ ID NO: 3299 - RNA, 19 nt, artificial
  RNA for silencing
cuuccccccaacccuuuau

SEQ ID NO: 3300 - RNA, 19 nt, artificial
  RNA for silencing
uuccccccaacccuuuauu

SEQ ID NO: 3301 - RNA, 19 nt, artificial
  RNA for silencing
uccccccaacccuuuauuu

SEQ ID NO: 3302 - RNA, 19 nt, artificial
  RNA for silencing
ccccccaacccuuuauuuu

SEQ ID NO: 3303 - RNA, 19 nt, artificial
  RNA for silencing
cccccaacccuuuauuuug

SEQ ID NO: 3304 - RNA, 19 nt, artificial
  RNA for silencing
ccccaacccuuuauuuugu

SEQ ID NO: 3305 - RNA, 19 nt, artificial
  RNA for silencing
cccaacccuuuauuuugug

SEQ ID NO: 3306 - RNA, 19 nt, artificial
  RNA for silencing
ccaacccuuuauuuugugu

SEQ ID NO: 3307 - RNA, 19 nt, artificial
  RNA for silencing
caacccuuuauuuuguguu

SEQ ID NO: 3308 - RNA, 19 nt, artificial
  RNA for silencing
aacccuuuauuuuguguuu

SEQ ID NO: 3309 - RNA, 19 nt, artificial
  RNA for silencing
acccuuuauuuuguguuuu

SEQ ID NO: 3310 - RNA, 19 nt, artificial
  RNA for silencing
cccuuuauuuuguguuuua

SEQ ID NO: 3311 - RNA, 19 nt, artificial
  RNA for silencing
ccuuuauuuuguguuuuaa

SEQ ID NO: 3312 - RNA, 19 nt, artificial
  RNA for silencing
cuuuauuuuguguuuuaag

SEQ ID NO: 3313 - RNA, 19 nt, artificial
  RNA for silencing
uuuauuuuguguuuuaagc

SEQ ID NO: 3314 - RNA, 19 nt, artificial
  RNA for silencing
uuauuuuguguuuuaagcu

SEQ ID NO: 3315 - RNA, 19 nt, artificial
  RNA for silencing
uauuuuguguuuuaagcug

SEQ ID NO: 3316 - RNA, 19 nt, artificial
  RNA for silencing
auuuuguguuuuaagcugu

SEQ ID NO: 3317 - RNA, 19 nt, artificial
  RNA for silencing
uuuuguguuuuaagcugua

SEQ ID NO: 3318 - RNA, 19 nt, artificial
  RNA for silencing
uuuguguuuuaagcuguau

SEQ ID NO: 3319 - RNA, 19 nt, artificial
  RNA for silencing
uuguguuuuaagcuguaug

SEQ ID NO: 3320 - RNA, 19 nt, artificial
  RNA for silencing
uguguuuuaagcuguauga

SEQ ID NO: 3321 - RNA, 19 nt, artificial
  RNA for silencing
guguuuuaagcuguaugac

SEQ ID NO: 3322 - RNA, 19 nt, artificial
  RNA for silencing
uguuuuaagcuguaugacu

SEQ ID NO: 3323 - RNA, 19 nt, artificial
  RNA for silencing
guuuuaagcuguaugacuu

SEQ ID NO: 3324 - RNA, 19 nt, artificial
  RNA for silencing
uuuuaagcuguaugacuuu

SEQ ID NO: 3325 - RNA, 19 nt, artificial
  RNA for silencing
uuuaagcuguaugacuuua

SEQ ID NO: 3326 - RNA, 19 nt, artificial
  RNA for silencing
uuaagcuguaugacuuuau

SEQ ID NO: 3327 - RNA, 19 nt, artificial
  RNA for silencing
uaagcuguaugacuuuauc

SEQ ID NO: 3328 - RNA, 19 nt, artificial
  RNA for silencing
aagcuguaugacuuuauca

SEQ ID NO: 3329 - RNA, 19 nt, artificial
  RNA for silencing
agcuguaugacuuuaucac

SEQ ID NO: 3330 - RNA, 19 nt, artificial
  RNA for silencing
gcuguaugacuuuaucacu

SEQ ID NO: 3331 - RNA, 19 nt, artificial
  RNA for silencing
cuguaugacuuuaucacug

SEQ ID NO: 3332 - RNA, 19 nt, artificial
  RNA for silencing
uguaugacuuuaucacuga

SEQ ID NO: 3333 - RNA, 19 nt, artificial
  RNA for silencing
guaugacuuuaucacugag

SEQ ID NO: 3334 - RNA, 19 nt, artificial
  RNA for silencing
uaugacuuuaucacugaga

SEQ ID NO: 3335 - RNA, 19 nt, artificial
  RNA for silencing
augacuuuaucacugagaa

SEQ ID NO: 3336 - RNA, 19 nt, artificial
  RNA for silencing
ugacuuuaucacugagaau

SEQ ID NO: 3337 - RNA, 19 nt, artificial
  RNA for silencing
gacuuuaucacugagaaua

SEQ ID NO: 3338 - RNA, 19 nt, artificial
  RNA for silencing
acuuuaucacugagaauaa

SEQ ID NO: 3339 - RNA, 19 nt, artificial
  RNA for silencing
cuuuaucacugagaauaau

SEQ ID NO: 3340 - RNA, 19 nt, artificial
  RNA for silencing
uuuaucacugagaauaaua

SEQ ID NO: 3341 - RNA, 19 nt, artificial
  RNA for silencing
uuaucacugagaauaauac

SEQ ID NO: 3342 - RNA, 19 nt, artificial
  RNA for silencing
uaucacugagaauaauaca

SEQ ID NO: 3343 - RNA, 19 nt, artificial
  RNA for silencing
aucacugagaauaauacau

SEQ ID NO: 3344 - RNA, 19 nt, artificial
  RNA for silencing
ucacugagaauaauacaug

SEQ ID NO: 3345 - RNA, 19 nt, artificial
  RNA for silencing
cacugagaauaauacaugu

SEQ ID NO: 3346 - RNA, 19 nt, artificial
  RNA for silencing
acugagaauaauacauguu

SEQ ID NO: 3347 - RNA, 19 nt, artificial
  RNA for silencing
cugagaauaauacauguua

SEQ ID NO: 3348 - RNA, 19 nt, artificial
  RNA for silencing
ugagaauaauacauguuaa

SEQ ID NO: 3349 - RNA, 19 nt, artificial
  RNA for silencing
gagaauaauacauguuaaa

SEQ ID NO: 3350 - RNA, 19 nt, artificial
  RNA for silencing
agaauaauacauguuaaac

SEQ ID NO: 3351 - RNA, 19 nt, artificial
  RNA for silencing
gaauaauacauguuaaacg

SEQ ID NO: 3352 - RNA, 19 nt, artificial
  RNA for silencing
aauaauacauguuaaacgu

SEQ ID NO: 3353 - RNA, 19 nt, artificial
  RNA for silencing
auaauacauguuaaacguu

SEQ ID NO: 3354 - RNA, 19 nt, artificial
  RNA for silencing
uaauacauguuaaacguuu

SEQ ID NO: 3355 - RNA, 19 nt, artificial
  RNA for silencing
aauacauguuaaacguuug

SEQ ID NO: 3356 - RNA, 19 nt, artificial
  RNA for silencing
auacauguuaaacguuugu

SEQ ID NO: 3357 - RNA, 19 nt, artificial
  RNA for silencing
uacauguuaaacguuugug

SEQ ID NO: 3358 - RNA, 19 nt, artificial
  RNA for silencing
acauguuaaacguuugugg

SEQ ID NO: 3359 - RNA, 19 nt, artificial
  RNA for silencing
cauguuaaacguuuguggu

SEQ ID NO: 3360 - RNA, 19 nt, artificial
  RNA for silencing
auguuaaacguuuguggua

SEQ ID NO: 3361 - RNA, 19 nt, artificial
  RNA for silencing
uguuaaacguuugugguaa

SEQ ID NO: 3362 - RNA, 19 nt, artificial
  RNA for silencing
guuaaacguuugugguaag

SEQ ID NO: 3363 - RNA, 19 nt, artificial
  RNA for silencing
uuaaacguuugugguaaga

SEQ ID NO: 3364 - RNA, 19 nt, artificial
  RNA for silencing
uaaacguuugugguaagag

SEQ ID NO: 3365 - RNA, 19 nt, artificial
  RNA for silencing
aaacguuugugguaagagg

SEQ ID NO: 3366 - RNA, 19 nt, artificial
  RNA for silencing
aacguuugugguaagaggu

SEQ ID NO: 3367 - RNA, 19 nt, artificial
  RNA for silencing
acguuugugguaagagguc

SEQ ID NO: 3368 - RNA, 19 nt, artificial
  RNA for silencing
cguuugugguaagagguca

SEQ ID NO: 3369 - RNA, 19 nt, artificial
  RNA for silencing
guuugugguaagaggucag

SEQ ID NO: 3370 - RNA, 19 nt, artificial
  RNA for silencing
uuugugguaagaggucagu

SEQ ID NO: 3371 - RNA, 19 nt, artificial
  RNA for silencing
uugugguaagaggucagug

SEQ ID NO: 3372 - RNA, 19 nt, artificial
  RNA for silencing
ugugguaagaggucagugg

SEQ ID NO: 3373 - RNA, 19 nt, artificial
  RNA for silencing
gugguaagaggucaguggu

SEQ ID NO: 3374 - RNA, 19 nt, artificial
  RNA for silencing
ugguaagaggucaguggua

SEQ ID NO: 3375 - RNA, 19 nt, artificial
  RNA for silencing
gguaagaggucagugguau

SEQ ID NO: 3376 - RNA, 19 nt, artificial
  RNA for silencing
guaagaggucagugguauc

SEQ ID NO: 3377 - RNA, 19 nt, artificial
  RNA for silencing
uaagaggucagugguaucu

SEQ ID NO: 3378 - RNA, 19 nt, artificial
  RNA for silencing
aagaggucagugguaucug

SEQ ID NO: 3379 - RNA, 19 nt, artificial
  RNA for silencing
agaggucagugguaucugc

SEQ ID NO: 3380 - RNA, 19 nt, artificial
  RNA for silencing
gaggucagugguaucugcc

SEQ ID NO: 3381 - RNA, 19 nt, artificial
  RNA for silencing
aggucagugguaucugccc

SEQ ID NO: 3382 - RNA, 19 nt, artificial
  RNA for silencing
ggucagugguaucugcccu

SEQ ID NO: 3383 - RNA, 19 nt, artificial
  RNA for silencing
gucagugguaucugcccug

SEQ ID NO: 3384 - RNA, 19 nt, artificial
  RNA for silencing
ucagugguaucugcccuga

SEQ ID NO: 3385 - RNA, 19 nt, artificial
  RNA for silencing
cagugguaucugcccugaa

SEQ ID NO: 3386 - RNA, 19 nt, artificial
  RNA for silencing
agugguaucugcccugaau

SEQ ID NO: 3387 - RNA, 19 nt, artificial
  RNA for silencing
gugguaucugcccugaauc

SEQ ID NO: 3388 - RNA, 19 nt, artificial
  RNA for silencing
ugguaucugcccugaaucu

SEQ ID NO: 3389 - RNA, 19 nt, artificial
  RNA for silencing
gguaucugcccugaaucug

SEQ ID NO: 3390 - RNA, 19 nt, artificial
  RNA for silencing
guaucugcccugaaucugc

SEQ ID NO: 3391 - RNA, 19 nt, artificial
  RNA for silencing
uaucugcccugaaucugcu

SEQ ID NO: 3392 - RNA, 19 nt, artificial
  RNA for silencing
aucugcccugaaucugcuu

SEQ ID NO: 3393 - RNA, 19 nt, artificial
  RNA for silencing
ucugcccugaaucugcuuc

SEQ ID NO: 3394 - RNA, 19 nt, artificial
  RNA for silencing
cugcccugaaucugcuuca

SEQ ID NO: 3395 - RNA, 19 nt, artificial
  RNA for silencing
ugcccugaaucugcuucaa

SEQ ID NO: 3396 - RNA, 19 nt, artificial
  RNA for silencing
gcccugaaucugcuucaaa

SEQ ID NO: 3397 - RNA, 19 nt, artificial
  RNA for silencing
cccugaaucugcuucaaag

SEQ ID NO: 3398 - RNA, 19 nt, artificial
  RNA for silencing
ccugaaucugcuucaaaga

SEQ ID NO: 3399 - RNA, 19 nt, artificial
  RNA for silencing
cugaaucugcuucaaagag

SEQ ID NO: 3400 - RNA, 19 nt, artificial
  RNA for silencing
ugaaucugcuucaaagagu

SEQ ID NO: 3401 - RNA, 19 nt, artificial
  RNA for silencing
gaaucugcuucaaagaguu

SEQ ID NO: 3402 - RNA, 19 nt, artificial
  RNA for silencing
aaucugcuucaaagaguua

SEQ ID NO: 3403 - RNA, 19 nt, artificial
  RNA for silencing
aucugcuucaaagaguuau

SEQ ID NO: 3404 - RNA, 19 nt, artificial
  RNA for silencing
ucugcuucaaagaguuauu

SEQ ID NO: 3405 - RNA, 19 nt, artificial
  RNA for silencing
cugcuucaaagaguuauuu

SEQ ID NO: 3406 - RNA, 19 nt, artificial
  RNA for silencing
ugcuucaaagaguuauuuc

SEQ ID NO: 3407 - RNA, 19 nt, artificial
  RNA for silencing
gcuucaaagaguuauuuca

SEQ ID NO: 3408 - RNA, 19 nt, artificial
  RNA for silencing
cuucaaagaguuauuucaa

SEQ ID NO: 3409 - RNA, 19 nt, artificial
  RNA for silencing
uucaaagaguuauuucaaa

SEQ ID NO: 3410 - RNA, 19 nt, artificial
  RNA for silencing
ucaaagaguuauuucaaau

SEQ ID NO: 3411 - RNA, 19 nt, artificial
  RNA for silencing
caaagaguuauuucaaauu

SEQ ID NO: 3412 - RNA, 19 nt, artificial
  RNA for silencing
aaagaguuauuucaaauua

SEQ ID NO: 3413 - RNA, 19 nt, artificial
  RNA for silencing
aagaguuauuucaaauuaa

SEQ ID NO: 3414 - RNA, 19 nt, artificial
  RNA for silencing
agaguuauuucaaauuaaa

SEQ ID NO: 3415 - RNA, 19 nt, artificial
  RNA for silencing
gaguuauuucaaauuaaaa

SEQ ID NO: 3416 - RNA, 19 nt, artificial
  RNA for silencing
aguuauuucaaauuaaaag

SEQ ID NO: 3417 - RNA, 19 nt, artificial
  RNA for silencing
guuauuucaaauuaaaagc

SEQ ID NO: 3418 - RNA, 19 nt, artificial
  RNA for silencing
uuauuucaaauuaaaagca

SEQ ID NO: 3419 - RNA, 19 nt, artificial
  RNA for silencing
uauuucaaauuaaaagcaa

SEQ ID NO: 3420 - RNA, 19 nt, artificial
  RNA for silencing
auuucaaauuaaaagcaaa

SEQ ID NO: 3421 - RNA, 19 nt, artificial
  RNA for silencing
uuucaaauuaaaagcaaaa

SEQ ID NO: 3422 - RNA, 19 nt, artificial
  RNA for silencing
uucaaauuaaaagcaaaac

SEQ ID NO: 3423 - RNA, 19 nt, artificial
  RNA for silencing
ucaaauuaaaagcaaaaca

SEQ ID NO: 3424 - RNA, 19 nt, artificial
  RNA for silencing
caaauuaaaagcaaaacaa

SEQ ID NO: 3425 - RNA, 19 nt, artificial
  RNA for silencing
aaauuaaaagcaaaacaaa

SEQ ID NO: 3426 - RNA, 19 nt, artificial
  RNA for silencing
aauuaaaagcaaaacaaaa

SEQ ID NO: 3427 - RNA, 19 nt, artificial
  RNA for silencing
auuaaaagcaaaacaaaac

SEQ ID NO: 3428 - RNA, 19 nt, artificial
  RNA for silencing
uuaaaagcaaaacaaaaca

SEQ ID NO: 3429 - RNA, 19 nt, artificial
  RNA for silencing
uaaaagcaaaacaaaacaa

SEQ ID NO: 3430 - RNA, 19 nt, artificial
  RNA for silencing
aaaagcaaaacaaaacaaa

SEQ ID NO: 3431 - RNA, 21 nt, Artificial Sequence
  RNA for silencing
gagccaguugucaagaagauu

SEQ ID NO: 3432 - RNA, 19 nt, Artificial Sequence
  RNA for silencing
ggaguaguuguacagguug

SEQ ID NO: 3433 - RNA, 19 nt, Artificial Sequence
  RNA for silencing
gacuggcuugacauguaug

SEQ ID NO: 3434 - RNA, 19 nt, Artificial Sequence
  RNA for silencing
auggcgguucuccaucccu

SEQ ID NO: 3435 - DNA, 19 bp, Artificial Sequence
  Target sequence of Dmrt1 gene
ggcacaagcggttctgcat

SEQ ID NO: 3436 - DNA, 19 bp, artificial
  Target sequence of Dmrt1 gene
gactgccagtgcaagaagt

SEQ ID NO: 3437 - DNA, 19 bp, artificial
  Target sequence of Dmrt1 gene
ctgagccagttgtcaagaa

SEQ ID NO: 3438 - DNA, 19 bp, artificial
  Target sequence of Dmrt1 gene
gagccagttgtcaagaaga

SEQ ID NO: 3439 - DNA, 19 bp, artificial
  Target sequence of Dmrt1 gene
gacggatgctcattcagga

SEQ ID NO: 3440 - DNA, 19 bp, artificial
  Target sequence of Dmrt1 gene
gcacgtctgatttggttgt

SEQ ID NO: 3441 - DNA, 19 bp, artificial
  Target sequence of Dmrt1 gene
gtggactccacctactaca

SEQ ID NO: 3442 - DNA, 19 bp, artificial
  Target sequence of Dmrt1 gene
ccagccatccctgtatcct

SEQ ID NO: 3443 - DNA, 19 bp, artificial
  Target sequence of Dmrt1 gene
ccatccctgtatccttact

SEQ ID NO: 3444 - DNA, 19 bp, artificial
  Target sequence of Dmrt1 gene
catccctgtatccttacta

SEQ ID NO: 3445 - DNA, 19 bp, artificial
  Target sequence of Dmrt1 gene
ccctgtatccttactataa

SEQ ID NO: 3446 - DNA, 19 bp, artificial
  Target sequence of Dmrt1 gene
ctgtatccttactataaca

SEQ ID NO: 3447 - DNA, 19 bp, artificial
  Target sequence of Dmrt1 gene
cttactataacaacctgta

SEQ ID NO: 3448 - DNA, 19 bp, artificial
  Target sequence of Dmrt1 gene
ctcccagtaccaaatggca

SEQ ID NO: 3449 - DNA, 19 bp, artificial
  Target sequence of Dmrt1 gene
gccactgagtcttcctcaa

SEQ ID NO: 3450 - DNA, 19 bp, artificial
  Target sequence of Dmrt1 gene
ctgagtcttcctcaagtga

SEQ ID NO: 3451 - DNA, 19 bp, artificial
  Target sequence of Dmrt1 gene
gagtcttcctcaagtgaga

SEQ ID NO: 3452 - DNA, 19 bp, artificial
  Target sequence of Dmrt1 gene
ctcccagcaacatacatgt

SEQ ID NO: 3453 - DNA, 19 bp, artificial
  Target sequence of Dmrt1 gene
cccagcaacatacatgtca

SEQ ID NO: 3454 - DNA, 19 bp, artificial
  Target sequence of Dmrt1 gene
ccagcaacatacatgtcaa

SEQ ID NO: 3455 - DNA, 19 bp, artificial
  Target sequence of Dmrt1 gene
cagatgaagggaatggaga

SEQ ID NO: 3456 - DNA, 19 bp, artificial
  Target sequence of Dmrt1 gene
ccacctgcgtcacacagat

SEQ ID NO: 3457 - DNA, 19 bp, artificial
  Target sequence of Dmrt1 gene
cacctgcgtcacacagata

SEQ ID NO: 3458 - DNA, 19 bp, artificial
  Target sequence of Dmrt1 gene
cctgcgtcacacagatact

SEQ ID NO: 3459 - DNA, 19 bp, artificial
  Target sequence of Dmrt1 gene
ctcctactcagagtcgaaa

SEQ ID NO: 3460 - DNA, 19 bp, artificial
  Target sequence of Dmrt1 gene
cactgttgccttgttctgt

SEQ ID NO: 3461 - DNA, 19 bp, artificial
  Target sequence of Dmrt1 gene
ggtgccgtgatgtgtttgt

SEQ ID NO: 3462 - DNA, 19 bp, artificial
  Target sequence of Dmrt1 gene
gtgccgtgatgtgtttgta

SEQ ID NO: 3463 - DNA, 19 bp, artificial
  Target sequence of Dmrt1 gene
gccgtgatgtgtttgtagt

SEQ ID NO: 3464 - DNA, 19 bp, artificial
  Target sequence of Dmrt1 gene
cctcgtatcgccaaattaa

SEQ ID NO: 3465 - DNA, 19 bp, artificial
  Target sequence of Dmrt1 gene
gcctcgacttagattgcaa

SEQ ID NO: 3466 - DNA, 19 bp, artificial
  Target sequence of Dmrt1 gene
cctcgacttagattgcaat

SEQ ID NO: 3467 - DNA, 19 bp, artificial
  Target sequence of Dmrt1 gene
ctcgacttagattgcaata

SEQ ID NO: 3468 - DNA, 19 bp, artificial
  Target sequence of Dmrt1 gene
cgacttagattgcaatata

SEQ ID NO: 3469 - DNA, 19 bp, artificial
  Target sequence of Dmrt1 gene
gacttagattgcaatataa

SEQ ID NO: 3470 - DNA, 19 bp, artificial
  Target sequence of Dmrt1 gene
gcggccagcaaacaagtct

SEQ ID NO: 3471 - DNA, 19 bp, artificial
  Target sequence of Dmrt1 gene
ggccagcaaacaagtctca

SEQ ID NO: 3472 - DNA, 19 bp, artificial
  Target sequence of Dmrt1 gene
gccagcaaacaagtctcaa

SEQ ID NO: 3473 - DNA, 19 bp, artificial
  Target sequence of Dmrt1 gene
ccagcaaacaagtctcaaa

SEQ ID NO: 3474 - DNA, 19 bp, artificial
  Target sequence of Dmrt1 gene
gcgtttctgcgagtgttat

SEQ ID NO: 3475 - DNA, 19 bp, artificial
  Target sequence of Dmrt1 gene
gtgtcctcttcctgtgtta

SEQ ID NO: 3476 - DNA, 19 bp, artificial
  Target sequence of Dmrt1 gene
gtcctcttcctgtgttaca

SEQ ID NO: 3477 - DNA, 19 bp, artificial
  Target sequence of Dmrt1 gene
cctcttcctgtgttacaga

SEQ ID NO: 3478 - DNA, 19 bp, artificial
  Target sequence of Dmrt1 gene
ctcttcctgtgttacagaa

SEQ ID NO: 3479 - DNA, 19 bp, artificial
  Target sequence of Dmrt1 gene
gaagccaacctgaaatgaa

SEQ ID NO: 3480 - DNA, 19 bp, artificial
  Target sequence of Dmrt1 gene
gccaacctgaaatgaaact

SEQ ID NO: 3481 - DNA, 19 bp, artificial
  Target sequence of Dmrt1 gene
ccaacctgaaatgaaacta

SEQ ID NO: 3482 - DNA, 19 bp, artificial
  Target sequence of Dmrt1 gene
cctgaaatgaaactagtct

SEQ ID NO: 3483 - DNA, 19 bp, artificial
  Target sequence of Dmrt1 gene
gttgcagctgtacctgaaa

SEQ ID NO: 3484 - DNA, 19 bp, artificial
  Target sequence of Dmrt1 gene
gcagctgtacctgaaataa

SEQ ID NO: 3485 - DNA, 19 bp, artificial
  Target sequence of Dmrt1 gene
cagctgtacctgaaataaa

SEQ ID NO: 3486 - DNA, 62 bp, Artificial Sequence
  Oligonucleotide primer
gactgccagtgcaagaagtttcaagagaacttcttgcactggcagtctttttggaaggatcc

SEQ ID NO: 3487 - DNA, 66 bp, Artificial Sequence
  Oligonucleotide primer
tcgaggatccttccaaaaagactgccagtgcaagaagttctcttgaaacttcttgcactggcagtc

SEQ ID NO: 3488 - DNA, 62 bp, Artificial Sequence
  Oligonucleotide primer
gagccagttgtcaagaagattcaagagatcttcttgacaactggctctttttggaaggatcc

SEQ ID NO: 3489 - DNA, 66 bp, Artificial Sequence
  Oligonucleotide primer
tcgaggatccttccaaaaagagccagttgtcaagaagatctcttgaatcttcttgacaactggctc

SEQ ID NO: 3490 - DNA, 62 bp, Artificial Sequence
  Oligonucleotide primer
ctgtatccttactataacattcaagagatgttatagtaaggatacagtttttggaaggatcc

SEQ ID NO: 3491 - DNA, 66 bp, Artificial Sequence
  Oligonucleotide primer
tcgaggatccttccaaaaactgtatccttactataacatctcttgaatgttatagtaaggatacag

SEQ ID NO: 3492 - DNA, 62 bp, Artificial Sequence
  Oligonucleotide primer
ctcccagcaacatacatgtttcaagagaacatgtatgttgctgggagtttttggaaggatcc

SEQ ID NO: 3493 - DNA, 66 bp, Artificial Sequence
  Oligonucleotide primer
tcgaggatccttccaaaaactcccagcaacatacatgttctcttgaaacatgtatgttgctgggag

SEQ ID NO: 3494 - DNA, 18 bp, Artificial Sequence
  Oligonucleotide primer
ccatccctttcatctgcc

SEQ ID NO: 3495 - DNA, 22 bp, Artificial Sequence
  Oligonucleotide primer
tcaagccagtcaggaaaacagt

SEQ ID NO: 3496 - DNA, 18 bp, Artificial Sequence
  Oligonucleotide primer
tcatggcatggcggttct

SEQ ID NO: 3497 - DNA, 22 bp, Artificial Sequence
  Oligonucleotide primer
tgctggcaccagacttgccctc

SEQ ID NO: 3498 - DNA, 20 bp, Artificial Sequence
  Oligonucleotide primer
cggctaccacatccaaggaa

SEQ ID NO: 3499 - DNA, 18 bp, Artificial Sequence
  Oligonucleotide primer
gctggaattaccgcggct
